United States Patent Application Publication US 2014/0244228 A1 - sequence listing, part 2

SEQ ID NO: 2977 - DNA, 2757 bp, Artificial Sequence
  Optimized genes for Lactococcus lactis
atgaaattttatcaaaaatcaaaagaagaacttttgcactcatacgatgtgaaaattgaccgtggtctttcatctactcaagtaactgataaccgtgaacgttatggagaaaataaattgccagaagaaaaagaagaatcttacttaaaagtattcttcaaatcttttaaagaaccaattattattgttttgcttggagcagtagcacttagttttttctcctcattctacagcttccaaattgttggtgataagaaacatggtttggaatcactctatgaagcaatcgctattgccattttaattatcatcaacgcttttcttggtttttggcaagaaatttctgctcgaaagaatttaaatagcttaaaggagatgaataatcgttttgcaagcgttttgcgtgatggtgctttagaaaaaatttcatcaaatgaattggttgtcggcgatatcgtaaaagtgacagttggcgactttgtagaagctgatattcgctggcttgaacttgatgaattgcaacttattgaaagtcatttaacaggggaggctgatgcgattattaaaaacattgaagttatcaatgaaaacgttgaaattggcgaccaaacaaacatgggtttctctggttcaattgtttctaatggacaaggaattgggattgtggttgcgaccggtgaaaatacagaattaggtaaaatttcacagttgatgaaagatgaaggaattaaatcgtctcctttacaagaaactgttaaaaaacttacaaaaaccttaatgaagattagtgcaggaattgttttactaacatttgtttttggactaatctcatcaggagaatttagcattaattcaatcacttctgttttttcaacttcaattgcattggctgtcgcttcaatacctgatgctcttccggttgtgctgtctattgtcttgacaatcggagctgttaaaatgtctaaaaataaaggattaataaaaacactctcctcggttgaaacacttggctcgaccagctatatttgtagtgataaaacaggcacactaacacaaaacgaaatgaccgttactaaattttacgccaatggtcagctttataatgttgacggtttgggttactcaagtattggtgagattcatttgattgctaaaggggaaaaaaatattaattttgcccaatttatgaaaaatatcgttctttgtaatgatagttctgtaaaagaagttgaaggtcaagtcaaaacttttgggaatcctactgaggtagctctaacggtattgggaagtaaagctggttatagcaaaaataaattattgaaaaataacaaaataatacggacgcttcctttttcttcttcaagaaaaatgatgagtgtgattgttcaaaatgacgaaggcttttatgtttatactaagggggcaccagatgtattgatggaaaaagcaagtggaatactgattggagatattgtcgaccaatctgaacaatcaaaagataatttcattaaagttgttgatgattatgctgacgaagctttgagaacattagcagttgcttataaaaaagttgatgaagaagaagccttatatggtgcaacagaagatgttgagaaagattttatccttactggtgttgctggtatcattgatccaccacgtgaggaagtgaaggagtctatccgtcaacttcatgatgcaaatattaacgtagttatgattactggtgaccacgaaaagacggctagggcgatagcctatgatttgggaattgtaaaggaaaaaaatgcaactgtccttaaaggtattgatttagaggaaatgtcagatcaaaaactatatgcagaagttaaaaatgttaacgtctacgctcgtgtgacacctgaacataaacaacgtatcgtgaagcaacttcaaaatcatcaacaagttgttgccatgacaggtgatggagtcaatgatgctccagctctccgagctgcagatataggtgtagcgatgggaatcacaggaactgaagtcactaaagactctgcggatttaattcttttagatgacaaattcacaactatcgaaaaaagtgtatattcaggtcgtactatttatgctaatataaagaacttcatgcgtcatgaactcactacaaatgtagccgaagtactcgcactggtgctcggtttagtactttttcgttcaagtgttggaaatgtcgcagcaatgactcctaccttaactgctttaatggttctttgggttaatatggtcagtgacgcaattccttcatttagtttaggctatgacgttgctgaaacagatctgatgaaagaaaaaccaagaaatccaaatgaatccattctagcgaatcacacttggtcacgagtgcttatcagaggaacggtaatgggaacaatggtttatttaggatttttacttgctgctcagaacggacttaatgctagtgaagcacaaactgttgcatttttaacgttagtttacgggcaattatggcatgtttttgatgcccgcagttcacggactttgttccgtcgcaacccctttggtaatattagactcgttggtgcggttttatttgctggagtttcaagctttttggtaacaattattcccttctttaattctgtcatgggtacagctcaactcacccttccagtttatcttcttgttatttttattccagcattaccaacattgattttgtcaggcatcaaagaggtctttaaaatcaaaatttggtaa

SEQ ID NO: 2978 - DNA, 1242 bp, Artificial Sequence
  Optimized genes for Lactococcus lactis
atgaaatacgaaaaattattaccacgattcttagaatatgtaaaagtaaatactcgttctgatgaaaattctacaacaactccaagtacacaagcactggttgaatttgctcataaaatgggagaagatatgaaagctcttggtcttaaagacgttcactacttagagtctaatggttatgttattggaaccattccagcaaatacagacaaaaaagttagaaaaatagggctcctggcccatttagatactgccgatttcaacgctgagggcgtcaatccacaaattcttgaaaattatgatggagaaagcgtaatcaaactaggagatacagaatttactttggacccaaaagattttcctaacttaaaaaattacaaaggtcaaacattggtccatactgatggtaccacgctactcggttcagatgataagagtggggtggcagaaatcatgactcttgctgattatcttttaaatattaatcctgattttgaacatggtgaaatccgtgttggatttggtccagatgaagaaattggtgttggtgcagataaatttgatgttgctgactttgatgtagacttcgcttatacagttgatgggggcccgttgggagagttacaatatgaaacttttagtgcggctggagcggtaattgaattccaaggaaaaaatgtccatccaggtacagctaaaaacacaatggttaacgcccttcaacttgcaattgactatcataatgcacttcctgagtttgaccgtcctgaaaaaactgaaggaagagaaggttttttccacctcttgaaacttgacggaacgcccgaggaagctcgggcacagtatattattcgcgatcatgaagaaggcaagtttaatgaacgtaaagcgttgatgcaagaaattgctgataaaatgaatgctgaattaggacaaaatcgagtcaaacctgtgattaaagatcaatattataacatggctcaaatcattgagaaggatatgtcaattattgatattgcaaaaaaggcaatggaaaaccttgatatcgttcctattatcgaaccaattcgtggtggaacagatggctcaaaaatttcatttatgggtttgccaacaccaaatttatttgctggtggtgaaaatatgcacggacgttttgaatttgtttcagttcaaactatggaaaaagcagtggacactttattggaaataataagattgaataatgaagttgttaaataa

SEQ ID NO: 2979 - DNA, 477 bp, Artificial Sequence
  Optimized genes for Lactococcus lactis
atgcgtttgtttttatttttgattgcttggttacgttgcctacagttacttgatttagagaagcaagttaaatttgaatttaatttcttgagaaaagaaatgattaatgaaaatgataataaaggtacaacttacggctcaagaatcgccgcaaataatacaaaacaacgtcttcgtcgtatcgcttgtcgaactgctcacgaatggcttgaccaatcagaagaagtttttgaacaatttcatgaaaaacatcgttgtgatgtctttgttgttatttatccaccaaaacgttttaaatatgaccctcctaattatgaaccaacgagcaaggcgcttattgatggtctgacagatgcaggaatttggaatgatgataactataacgtaatacggcgcacttctttcgagcatggaggactcagtggtgacaccaaaacttggaaagttgaacttgtggtaaaagaattaacagaataa

SEQ ID NO: 2980 - DNA, 363 bp, Artificial Sequence
  Optimized genes for Lactococcus lactis
atggctcgtttagaaaagatttatgatgtttattttaatggtatcaaaatgggtacaggaacaaaaaaagagctttctaaaatgcttttggtgagtccacacagcgtcgctggatgggtaaaaaacggaatggccaactctcctaaaaataatgctgttaaaatcgcagttgttaatgaaaaagcaatgatggaaaaatatcctggttggaaaccatacggcggttcaaaatcaaagatttcagatgaaattactgatcgggaccgtcgtaaacatgaaactaaagaagaacgtcgcttgagacgaaatattcgtgctcaaatggcaattgaagctgcgagaaaagaagaattagggctctaa

SEQ ID NO: 2981 - DNA, 210 bp, Artificial Sequence
  Optimized genes for Lactococcus lactis
atgtcatacgtcgtaaacaaaacaggagatttttcaggttatcatgaagttcacaaaggtgcttgtcctaatagaccaatcgtgaccgacagctatcttattaataaacaatttgaaaatgatttagatgcaatggaatatgttaaagaaatttatccaagtttgcaagttcgtccttgcctctcttgtatggatacttcttcacgttaa

SEQ ID NO: 2982 - DNA, 399 bp, Artificial Sequence
  Optimized genes for Lactococcus lactis
atgaaaaaaatcaaaaatattgctatttcaactgttttgggcgcgtcagcattgattggactttcagcttgtagtcaagcagataaagtaagtcaaaatgtttcaaatgatgctgataattttaaagttgagagacgtgtcgtgataatcaacactcgtaccgacaaaattgaatttgttgctaaaggactaatcagtgtaaatacagaagacagcaagaaacttgtgattttagccaaggtaggtaaatctcaatataaaaaagatattattaacctcacaaacaataatatgtatacagttgaagatttatctggtgcaaatgtcaattcatacaaatatgaagttacttggttaccagaatctgttgttcctgttaaaattgttggtgaaaaataa

SEQ ID NO: 2983 - DNA, 1080 bp, Artificial Sequence
  Optimized genes for Lactococcus lactis
atgtcaatactaaatccattcgaacgtcgttcaagcattactccgaacaattattatccatttatggttcaaaatggttcaattgttcctaatagccttgttgatgctactgaagcgttaaaaaatagtgacctttacgcagttacctcattaatttcatcagatattgctggtacgcgatttattggaaaccaagtttttacaagtgtcttgaataatccttcgcacttgacaaatgctttttctttttggcaaacagcaattttgaatcttctcttaaacgggaatgttttcttggctattttaaagggtgataattcattgatgaaagagctccgtttgattccttcaaatgcaatcacaattgatttaactgatgatactttgacttatgaagttaatcaatttgatgattacccaagtgcaaaatataatgccagtgaaatgattcatgtaaaaatcatggcttatggtgtcgacacgcttcataatttagttggtcatagtccattagaatctctgacctcagaaattggccagcaaaaagaagcaaaccgtttaagcctttcaacattgaaaggggctttgaaccccacttctgtggtgaaagttccacaaggaactttaagttctgaagccaaagattccatcagaaaagaatttgaaaaagcaaatggaggaaataattctggtcgtgttatggtactggaccaatcagcagatttttcaactgtttcaattaatgctgacgtagctaattaccttaactcaatgaattggggacgcactcaaatcgcaaaggcctttggtgtttctgattcttatctcaatggcacaggagatcaacaaagtagccttgaccaaattaaagacctttatgttaacgcgcttaatcggttcatcgaaccacttatttctgagttaagaataaagtgtgattcaagtattggtgtagatatgtctccaattacagattattctaattcggtctttaaagctgatatcctaaactgggtaaaagaaggaattattgaacctacagaagctaaaacattacttgaatcaaaaggtattatctaa

SEQ ID NO: 2984 - DNA, 570 bp, Artificial Sequence
  Optimized genes for Lactococcus lactis
atggttgttaaagtttttgacgcttatattgaaggagaaaaaaaagcaactggtacaattgatgaaattgctgattattttgatatttcacgcacttctatatcgctttggattaaaaatggtaaagatccaaaaaaggcaaatcctaaatataaacatgcgatcttgaacaaagaaaaaactaaagagctgacagaacaaaaaaaaaaagaagaacgcaaacttccagcttctgtctacgactattatgataaaggtgaatttattattacagggacggcccgtgaaatcagtcaatttttgaaaattggaaaacacaatgtttattcatacatccaagtgggaaagtatgcttttgattaccgaaaaacacgtaaacatgcaattttaaatgaagctgaaactagaaaacgtttccctttgttaagcgtaagttcagaagaagaacttattgaaaccaaggagaaagaacgtagaaaacatgaaacaaaagaagagcgtcgtttaagacgaaatattcgtgctcaaatggcaatcgaagcagcccggaaggaagaattaggcctctaa

SEQ ID NO: 2985 - DNA, 1206 bp, Artificial Sequence
  Optimized genes for Lactococcus lactis
atgaaatttttcaataacaaacgaagtccaacagaagaatctaaagcaaaagatgaaattcctaaagcgccgcaggttgtcatgacattacctaatttctttaaagaacttatatcagatggttatacaaaacttagtgatagtcctgaagttcggatggctgtagattgtattgccgatttagtgtctaatatgaccattcaattgatgcaaaatggtgaaacaggggacaaaagaatcaaaaatgatctatctcgcgttgttgatatcgaaccaaataaatatttaagcagaaaaacatttatccaatggttagtccgctcaatgcttcttgaaggaaatggcaatgctgtggttaaaccacaagtcagtggtgataaaattataggacttacaccaatttcaccttacaaagtaactttcaacgtatccgatgacgatttagattattctattacttttgataataaggaatatgacccaagtacgctccttcattttgttttgaatccttcaattgaacgtccatttattggaacaggctataaagttgctttgaaagatattgtggggaatttaaaacaagcttcagtaacgaagaaaggttttatggcatcagagtatatgccaaacctaatcgtttcagttgactcggactctgatgaattatcagacgaggagggacgtgaaaattttgaagaaatgtaccttaaacgtaaagaagcaggtaaaccttggattattccagaaggtatggtaaatgttcaacaaattaaacccttgacacttaatgacttggcaattaatgatgcagtcaccttggataaaaaaactgttgcaggaatttttggtgtaccagcttttttgcttggtgttggaacttataataaagacgaatttaataatttcatcaatactaaaatcatgtctattgctcaagttattcagcaaacttacaacaagttgattgttgaagaagatatgtatttttcattaaatccacgttcactctacaattatagcctgacagagatggtttctgctggtgcccaaatgactcaacttaacgcgctccgtcgtaatgaatttagaaactgggttggaatgcctccagatgctgaaatggatgatctgttagttttagaaaactatcttcaacaaaaggatttggtcaatcaaaaaaaattaattcaagatgaaacttaa

SEQ ID NO: 2986 - DNA, 372 bp, Artificial Sequence
  Optimized genes for Lactococcus lactis
atggcaaataaaatttcaattgatgatttagccaaaacaattgaatcagaagttcgtaactggacaaaagatgtcgttgatgacatcgacgatatcaaaaaagatataactaaaaacggagttaaacaacttcgtgaaagttctccaaaaagaacaggtgattatgctaaaaattggacttcacagaagttgaaaaatggtgaccaagttatttatcaaaaagcaccaacttaccgtttaacccacctccttgaaaatggacatgctaagcgaaatgggggcagagtgagccctaaagttcatattgctcctgtagaagaagagctagtatcaaattatatttctcgcgttgaaaaacgtttgagtcaataa

SEQ ID NO: 2987 - DNA, 1602 bp, Artificial Sequence
  Optimized genes for Lactococcus lactis
atgactgaacattttatcacactctcaacaacagaaccaaataacaatgttggaattgttaaacttcgtcatgcagatgttaatagtcaagcaattgttgctcaaatcgttgaaaatggacaaccaaaaaatttcgaaggacttcagccatttttttgcttaatggcacaagaaattacaggtcaaggagtatctgaagaatctgtcgtcagttttgatgctaaaaatggtactttgaaatacattgcaagcgataatgctttgcaaatggttggtcgtaacgaagcatactttagtttccgtaaacaagaagacggtaaatggatagaacaattctcaactcgtacgtttaattatatcgtagaaaaatcaatttattcacaaccttttaaagattccaactattggtggacattcaaagaactgtacagaatttttaacaagtatattgaagatggaaaaaactcttgggaagaatttgtaaatcaaaataaagaaattttagagtctgttgatcctggtggaaaaattttgtcagaacttcttgctgctagaaatgggaaacctaatttaaagacacgtattgatgatttggaaaacaaaactactgcacagttagcagaaaaggtcgatatttcagcaacaaataagtttaaaggttatttcggcaccaattttgatatgcaaatgagtaaagactgggatcaaacctatcctatttctaaatttgttaccgaaattcaacaacttaaaccatatcaattagatggcgtctttattactgttgaaatccaaccacttcgagagcaacgtttagcttttgaagctaacactttaacgacaaatgatttacaatttacaacccttcctgatttaacttctttagcccaattggtaaacctttgtgaaactgaatcaattccaatcatgggtttaaaaattcataataattggtcaaatactcaatgggcaaaatttgacaaaacaatctggttttcgaaataccgcgcgacaatagaccaaattattgctattgcgcctacagaaaaaatcggggttcttaatgaaagtgatacaatttggcgagacagcgcgagcgaggccaatattatcgacttgatgaattacctcaaaggaactggtaaaaaagtaacgttagaaggcagctggtctccgctgacactttcaaagccattgcagaatgcaatggactattttgctatccatgcttatcccagtctatcatcaaaacgtgaacgtacaactttttctgattgtttgatgggatggagtgtgtccaatatgattgataacctccgcaaaataaaattcacttatccagataaagagatttggattacggaaacaggagtgcaaaatttatgggaagccctaagagctccagaagattattatactcctgaagataatacaccatcagctgacaatttggttcaaactctttattttgattcaatgtttcaatattttggttcagatgaattagtttctggtgtttttatgtggtacttcgattctaattatagtttgctttttgaaaaaatgcttagaaaatatcgggaggggactttccacgcttaa

SEQ ID NO: 2988 - DNA, 831 bp, Artificial Sequence
  Optimized genes for Lactococcus lactis
atgcttaataattatgtaaaaattaatggtgatattgactgggttaacattgattatgcaactcatgctgctgcactttttagagtgagattggatgaaaaaaaagctttttatacattccttggttcaaaaggagtagtcgtggtacgtttgcttcgtacgagttcttatgaaaattactataatgatatcatgattcgcttttcttccttggaccctaccacaaaaacaccaaatattagtgtctatgatttaaataaagataaaatgtttggttatacttacgcgatcaaagttatgtcagatggctacgcctacttctatgttaaaggttctaacaagtatgactcatttaaatatcaattagtttatgcttcaaatccttcatacatagaggcactcgggaccagcgcggatgttattactgttgcagattttgattcaagtacaaatgctgttgcttattataaaccttcgagccagacttttaatgttcccacgataacaatgggttatggtcaaaattcaacagatattaaaactcaaccactgacagcaatcaatcatggaaattatattcaacttgttggttacatcctagtttggtctggcttaactaatcaaacagtttttacagtaaatagttctaaaccaaaccgggctcacactttctttgttgatgtcatgggatctgctgacatcagtaatacagccggaaccttgcgagtaccaatgactattgaaaaggacggaactgcatcaattaacttaggaacaacaatttcaactactcgtttaatttatattgatacaacttatcgttttttataa

SEQ ID NO: 2989 - DNA, 171 bp, Artificial Sequence
  Optimized genes for Lactococcus lactis
atgctttattataaatgtttgagattagtttctagacgccgttttggttcattggctcaacttgaagcaaatcgatcagtagcaggaagttctccagctcgtacaattaataaatggcgtgttaaaaaacgtggtggaaatttagccaacagctttattatcatgttctaa

SEQ ID NO: 2990 - DNA, 396 bp, Artificial Sequence
  Optimized genes for Lactococcus lactis
atgaagagaccagttgaaattgttcaagatattatcgcagccagcgacttccctcatgatgaaatttttctcgactcaattccatcagaaaaacttgatagttcaaatgaaactcaagttttgcttacagaatcagataatggtccaagtgattatggcaactctgattttatttcgttgatgtatggtgtttatattcaaatcttttattctaatgctgaagattcaggaattaatattgtccagagtgaaataaacttaatgaaatcttttatcaataatgattggttaattgctcaatcaaaatcacactacattgaccctgatacaggacaaattattaaaaatcttaccgtacaacgtatcatgactttatctgagatagcaaatagttaa

SEQ ID NO: 2991 - DNA, 507 bp, Artificial Sequence
  Optimized genes for Lactococcus lactis
atggttagtttttatgatgcaatgcaattgattgttgatagagctgaagagctttcaacaaaaatgtcagttgaagataaagcagaagtaactaaagctggtgctaaagtttttgaacaagcacttgcttatgaagtgcgcaaccgtcattaccgacaccgtgatactggtgaagaccctcatttagctgatagtatagtcatgaaaaataaaaacattgatggagttaaagatggtcagtctgtagtaggttgggaacgttctacagaaaaaggaactcacaccaaagggtatattgctaatattattaataatggttcacgtttcccacaatttacaactcggagcggcagaaaatataaaaaaccaggagaagttgcagtccatgctgaccattttattgaagaaacaagaaaaaatcctatcgttcaacaaggaattttaaaggccgaagcagaggcgatgcgtaaaattatcaatcgtaagaaaaaagaatcaaatctctaa

SEQ ID NO: 2992 - DNA, 423 bp, Artificial Sequence
  Optimized genes for Lactococcus lactis
atggctgataaacttgaccgtattattggtgattatgttaacgggcgccttgaagcaagaataaaatcaattgagtctcgttacctttataaacaaaaagttgataatttaggaaatcgaacagcttattctggtggaagtgaacaactcagccacgtactaaataaagaggccttagaaaatgatgaagaatatattaaattgaaagatttgatgtatcaattttcactttggtatgaacctttgattaaggaagaaaaagaaatcatcaaattaaaacattgtggctatggtggttttacttggtacagagtcatgatggaattagacaatgaaggaattgaaatttcagaaaaaaaagcaaaatttatttattatcgtttccgtaaggatattaatccacatattggatactttatctaa

SEQ ID NO: 2993 - DNA, 360 bp, Artificial Sequence
  Optimized genes for Lactococcus lactis
atgattactgcaattgctcaaatcatgacttcaatttctatcatcattttacttgttttgattgtttttacaaataaaagattggcccaattagaagttaaaattgaacgttgtcgagatttatataacggtatcgacctcgttccactaagagtaaagataaattatttggaaggaagtattaaagcactttataaatacaaagttctttttaaacgtggttggtggtcacgcgagggagaacttcaagaagaatattttttcaccaaaaaacaagctgataaatttattgatagcaataatttaaaagaagtagtgattattcgtcttgaagataatgaaacagaaattgtcaaataa

SEQ ID NO: 2994 - DNA, 360 bp, Artificial Sequence
  Optimized genes for Lactococcus lactis
atgaccaacctttatgatgaaactgtaacgatactcgagagtcatgataaaacaattgccgatattgaatatattgggagctctgaaacaaaaattaatacaaataaggctttagaattaatgaaaaaaactaattatcactcaggttatggtggacaagaaattgctgaaaatttgatgattaaaggaaatggttttatcatgactagaggagagtacgacggttcagaatggtgggattatatgcaaacagacccttctttaccacaagttgaacgtgaagttaaatcatttaaagcaaatattggttgggaaagtcttgaagaaatcaacggcttggaagatactaaaaatgattaa

SEQ ID NO: 2995 - DNA, 927 bp, Artificial Sequence
  Optimized genes for Lactococcus lactis
atgaaatttaaaaaattaggccttgttatgactactgtttttgcaggagctgccctggtaacactttcaggttgttcaagctctgactcagcatcaaaagatattattacaatgaaaggtgacacaattagagtatcagatttatataaagaagctaaacaattcccaagtcaaccaacaaatactttgcttcaaaacttgacctttgataaaatttttactaaagattttggtaaagaagtgactgacaaagatgtgtctaagaaagtaaaatcaataaaagaccaatatggttcacaatttagtagtgcgctacagcaacaaggattgactgaagcatccttcacgccttatatgcgtacccaaatgcttgagcaagcagctatcgaccacgaaattaaagaaactcaatacactgatgctaatctcaagaaggcttgggaaagttatcatccagatgtcactgcttatgttgtttctgaaacaagtaaagatgcggcaacaaaagctttagatgcagcaaaaaaggatgatgctggaaaagcaagttttgaaaaaactaacgcagaatctaaagttacttttaattctacgagtacttctgtccctacagaagttcaaactgccgctttcaaattgaaaaatggtgaattttctgatgttattgaatcaactagttcatcaacaggggctacgtcttattatattgttgaaatggttaaaacatcagaaaaaggaacagatatgaataaatacaaaaaagaattacaaaatgtaatcaaaaccgagaaggaacaagatacaacatttgtttcaggagtcatcgccaaatatttaaaaaaaaataatgttacagttaaagagtctgcttttgcttcacttttttcacagttcacacaaacaagcagctcttcgtcgagcaaataa

SEQ ID NO: 2996 - DNA, 789 bp, Artificial Sequence
  Optimized genes for Lactococcus lactis
atgactaaacgaatttattctgttccatactttttatggattttattctttgttattgttcctttagcgatgctactttggcaatcattttttgatttgaatggtcacttcacattaaataattatatcctttatttttcatctggaacttatcttttgatgacttggaattcaattttgtacgcattgattattactgtagctaccttagtgatttcataccctgtcgcctatgttcttacgaagttaaaaatgaaacaattttggttaatgctcattatcttgcccacctgggttaaccttttattgaaagcttatgcttttatcggtatctttggtaaatatggttcagtaaacaattttcttcaattcctggggataggccgcacacaaattctttttacagacttgagcttcatcttagtcgcttcttatattagtattccatttatggttttaccaatttttaatgcacttaatgaccttgatgataatttagttaatgcttcagcagatttaggagccagtagatttcaaacttttactcaggtcatttggccactttctcttaacggcgtaagagctggtgttcaagcggtttttattcctagcctgtcgctcttcatgttgactcgtttaattggtggaaataaagtaataacacttggaacagcagttgaagaacattttttgacaactcaaaattggggaatgggaagtacaattgctgttgttttggtggtagcaatgcttctcgttatgcgtatgacaaaagaacgtcgtgattaa

SEQ ID NO: 2997 - DNA, 1068 bp, Artificial Sequence
  Optimized genes for Lactococcus lactis
atgaaaaaattgtcttacttctttgttggaatcttaattattactgcaagtctaggcctcatcacaaaccgcatgaaagcagctgatggagtaaaaacacaaaataatagtttgacaatttttaattggggtgaatatattgatccagatttaatcagtaaattccaaaaagaaacagggtacaaagtaaattatatgacatttgatagtaacgaagcaatgtattcgaaggtgaaacaaggtggaacagcttatgatttgattgtcccttctgattatatgattgaaaaaatggcaaaagagaatctacttatcaaattagaccattcaaaaattaaaggtcttaaagatgatgacccaaaacttttaaatcctgctttcgaccaaggaaatcaatattctgtgccttatttttggggaactcttggtattgtttataattctaaaaccgtaactcgtccaccgaagacttggaatgatatctggtcaccaacttataaaaattcaattttactgacagattcagtacgagatgttatggctatggttttaagcaaacacggctattcattgaatactacgaaccaaaaagaacttgatattgcttatcaagatttattaaagctcacccccaatgttaaagcaattttgggtgatgaaatcatgaattacatgataaacaatgaaactcctttagcagttgtttactctggtcaagttgctgaaatgacttcagaaaataaaaacttgaaatatgttattccagaaagaacaaatatttggtacgataaccttgctattcctaaaactgctaaaaatgtcaaagctgcctatgcttttattaattttatgcaagaaccaaagaatgcagcgcagaatgctcaatggattggttatgcaacaccaaatttaaaagcgaaggcccttttgccaaaagaaattcgtgataataaatcattttatcctgacgaggccacgataaaagacgatgaagcttacaaaaatcttaatccatattggacaggaatttataacgacctttatcttgaatttaaaatgaacaaataa

SEQ ID NO: 2998 - DNA, 591 bp, Artificial Sequence
  Optimized genes for Lactococcus lactis
atgacatatccacaattggaattagaaaattataaaggaacgaccgcgattattaatacaaatcatggtaaaatgactgttaaactttttgataatttggctccgaaaacagtcaagaactttattgagctttctaaagaaggttattatgatggcgtgattttccatcgtatcataaaagattttatggttcagggcggagacccaacaggaactggaatgggaggaagctcaatttatggtgaaaaatttgaagatgaattttcaatggatttatttaatttaagaggcgctttatcaatggctaatgctggtcctaatactaacgggagtcaatttttcatcgttcaaaataaaaatctaccttatcctaaggactcattgattcaaggaggttggccagaagaagttgcagaaacttacactggtggtggaacaccacaccttgatggtcgtcatacagtatttggtcaacttgtagatgaagagtcttacaaagtactcgacgaaattgccgcagtccgcgtgggggcacaagataaaccagttgatgatgttgttattgaaagtgttgaaatcattgaaccttaa

SEQ ID NO: 2999 - DNA, 1074 bp, Artificial Sequence
  Optimized genes for Lactococcus lactis
atgtttgaccaacttgaaagtatcgtcggacgttatgaggaacttggagaattgctcagcgaccctgaagttgtttcagataccaaacgttttatggaactatcgcgtgaagaagctgatttgcgtgataaggtagcgacgtacaatgaatataaaaaagtgttagagacaatttctgattctgaggaaatgcttggtgaaggtggtttagatgatgatatgaaagaaatgttgaaagaagagttgagttcagcaaaaagtcaaaaggaacttttagaagaagaaataaaaattcttctgcttccaaaagatccaaatgatggaaaaaatatcatccttgaaattcgtggtgctgctggaggagatgaagcagcactcttcgccggggaccttttgaatatgtatcagcatttttcagaatctcaaggatggaaatttgaaatcatggaagccaatattactggtataggcggctacaaagaagtttctgctttaatctctggtccttcagtttacagtaaattaaaatatgaatcaggtgcgcaccgagttcaacgtgtgccggtcactgaaacacaaggtcgtgttcacacgagtacagcaacagtcttagttatgcctgaggtagaagaatttgagatgactattgaccaaaaagacctacgcgttgatatttatcatgcttcaggggctggtggacaaaacgtaaacaaagtagcaactgctgttcgtatggttcatttaccaacaggaattaaagttgaaatgcaagaagaacgtactcaacagaaaaatcgagataaagcaattaagctcctgaacactaaagtttttgattattatcaacaaattgaattagacaaacaaaatgctgaaagaaaatcaacagttggaacaggtgatcggtctgaaagaattcgcacttataatttcccacaaaatagagtgaccgaccatagaattggtcttactttgcaaaaacttgattcaattttaagcggcaaaatggatgaagtaattgatgctttgattgtttatgatcaaacaaaaaagttggaagaattaaataaataa

SEQ ID NO: 3000 - DNA, 1851 bp, Artificial Sequence
  Optimized genes for Lactococcus lactis
atgaaacaatcaaaaatgcttattccaacacttcgcgaaatgccttctgatgctcaagtcatttcacatgcgcttttgatgagagctggttatgttcgtcaagtttctgctgggatttatgcttatcttccacttgctaatcgagtgttagaaaaattgaaaaatatcatgcgtgaagaattcgacgagattggagcagttgaattattagcaccttcattacttacagcagacctttggcgtgaaagtggccgttatgatacttatggagaagacttgtacaagctaaaaaaccgtgataattcagattttatcctcggtccaactcacgaagaaacaatgacatccctagtccgagatgaaatcactagttataaaaaattacccttaaatgtttaccaaatcgctccaaaatttcgtgacgaaaaacgtccaagatatggtctactccggggcagagagtttttgatgaaagatggttactcttatcatgctgaccaagattcacttgatgaaacctataatgactataaaaaagcttatgaaaaaatttttgaacgtgctggactgaattttaaaccaattattgcagatgcaggtgcaatgggtggaaaagacagtcaagaatttattgctattacagatgatcgaattaacttagaaaaatggttagtgctcagcaaaaatattacttcaattgaagaaattcctgaatcagttttaagtgaaataaaagaagagcttggtaaatggttgattgcgggagaagatacaattgtttatgctgaaggtggtgattatgcagccaacatcgaaatggcttcttcacaatttgagccgaacgtcgcctatactgaagaattggaacttgaaaaagtagctacgcccggtgcaaaaaccattgatgaagtgagtaaatttttagaaattgacgaagaacaaacagttaaaactttagtttatcacgctgatgatgaacttgttgtcgttttgcttaatggaaatgatcagttgaatgaagtaaaactgacaaattatttgggggcaagcttcattgaagctgcttcagaagcggaagtggaggagaaattcggtgctcattttggttcacttggacctattggtctagaaaatgtaaagattatagctgaccgtaaagttgaacaaattaaaaatgctgttgttggtgccaatgtagatggctttcattataagaacgctaactttggaagggactacgaagttgaagaatttgttgatttgcgaactgttaacgaaggcgagatcagtccagatggacgtggtaccttaaaattcgcgcgtggaattgagataggacatattttcaaactcgggacgcgctatacagaagccatgaatgcaaatattttagatgcaaatggtcgttcaatcccaatgttaatgggatgttacggcataggagtatcgcgccttttatctgccattcttgagcaattcgctcgtatttacgttgaaaagactcctagagaagaatttaaattttcttggtctattaattttcctaaagaattggcaccatttgatattcatttagttcctgttaatgttaaggatgaagcagcgatggaattgactagcgaacttgaagaaaaacttcgcggtaaaggatatcaagtactcgtcgacgatagaaatgaaagagccggggtcaaatttgctgatagtgatttaataggtttgccagttcgggttacaatcggaaagaaagcagcagaaggagtggtagaagttaaaattcgtgcaacaggtgaagttgtagagatcaataaagatgaattagtaaatactattgaaatcctgtctaaataa

SEQ ID NO: 3001 - DNA, 591 bp, Artificial Sequence
  Optimized genes for Lactococcus lactis
atgactaaaaaaacagagattaattttggaattgacagcaaacttgaaatccgtgatgcaaacaaaaaggctggttttattggtcaaattgccggttacgcaattgtttttaataaaccttcagttccaaatgctcctttcattgaatatattgctccaactgcgcttgataatgttgatttatctgacgtactcgccctttataatcatgattatgcaaatgtcctaggacgtgttgacgcagggaccttgaaattatcaattgataacatcgggcttcattttgttttagatatgcctgatactacagttggtcacgatgtttataacaatattaaagcaggaaatttaaaaggaatgtcatttggtttcgtggttgctgacggtggagattcttggcaacaaggtgtgtctaaaccaattcgaacaatcaatcaacttcagactttgggagaaatttcagtcgtatcaaagccagcttacgatgatacgagtataaatgtaacaagaagtatcaaacaatttgaagatgaacgtacacgcaaatataaagaaaaagttcgtgcttatttggacggcctgagtgattaa

SEQ ID NO: 3002 - DNA, 813 bp, Artificial Sequence
  Optimized genes for Lactococcus lactis
atggaatatggtgtactttctgtcatattagtcattgttgttgcttttttagccggcttagaaggaattttagatcaatggcaatttcatcaacccatcatcgcctgttcattaattggtatcgtaactggtcatgcgtcggcagggattattctcggtggttcacttcaacttattgcccttggttgggcaaatgttggagcagctgtcgctccagatgcagcacttgcaagcatagcatcatcaattttaatggttcaaagtaataattttgatttaactcatattatgggaacaatcgttccagctgccattcttctagcaactgctggtttggttcttaccacactggtacgaatgctttccgtagtcttggttcaccaggctgaccgtgctgctgaaaatggttcttattcaggtgttgaaatgtggcattttattgctttgatttgtcaaggacttcgtatcgctattcctgctggcctcctgttagttatctctcctgatgctattcaaaaagctcttgctgcaattccaccggtgatttctggcggattggcagttggcggtggaatggttgtggctgttggttatgcaatggtaattaatttgatggcaacaagagaagtttggccatttttcttcttaggatttgctttagcgcctatttcagagctcactttgatcgcgacaggagtgttaggtgtggttatagcgattgtttatttgaacttacaagcaagtggggggtcaggaaacggaacggctagtagttctggtgacccaattggagatattttgaatgattactaa

SEQ ID NO: 3003 - DNA, 267 bp, Artificial Sequence
  Optimized genes for Lactococcus lactis
atggcttcaaaagaatttcatattgttgttgaaactggaattcatgctcgtccagcaacactcttagttcacaccgcgagcaaatttacaagtgaaattactttggaatataaaggtaaatctgtaaatttaaaatcaatcatgggtgtcatgagtcttggtgtggggcaaggagcagatgttactatatctgccgagggcgctgacgctgatgatgcaatttcaacaattgcagaaacaatgactaaggaaggacttgctgaataa

SEQ ID NO: 3004 - DNA, 1509 bp, Artificial Sequence
  Optimized genes for Lactococcus lactis
atgaataaacgtgtgaaaatagtatcaacacttggtccagcagttgaaattcgtggtggtaaaaaattcggagaatcaggttattggggtgaaagtttagatgttgaagcatcagctaagaatattgcagcactcatagaagaaggagcaaatgttttccgtttcaacttctcacatggtgaccaccccgaacaaggtgcaagaatggctacagttcatcgtgctgaagaaatcgcgggacataaagttggttttttattggacacaaaaggtcctgaaatgcgtacagaattatttgctgacggagctgatgcaatctcagttgtaacaggagacaaatttagagtggcgactaaacagggtcttaagtccactccagaactcatcgcactaaacgtagctggtggacttgatatttttgatgatgtcgaaattggtcaaacaattttgattgacgatggtaagctaggcctgtctcttactgggaaagatgctgcaacacgtgaatttgaagtagaagctcaaaatgatggtgttattgggaaacaaaaaggagtcaacattccaaataccaaaattccttttccagctttggcagaacgtgatgatgctgatatccgctttggattaagtcaacctggcgggataaattttattgctatttcatttgttcgtaccgccaatgacgtaaaagaagttcgccgaatttgtgaagaaacagggaatcctcatgttcaacttcttgctaaaatcgaaaatcaacaaggaattgaaaatttagacgagattattgaagccgccgatggcatcatgattgctaggggcgatatgggaattgaggttccatttgagatggttccggtttatcaaaaacttattattagtaaagtaaacaaggctggaaaaattgttgttacagctacaaatatgcttgaatcaatgacttacaacccaagagcaacgcgctctgaaatttctgatgtttttaatgctgtcattgatggaacagatgcgacaatgttgtcaggcgagagtgctaatggtaaatatccacgagaaagcgtacggaccatggcaactgttaacaaaaatgcgcaaactatgcttaaagaatacggtcgtttgcatccagagcgttatgataaatctactgtaacggaagtggtggctgcttctgttaaaaatgccgccgaagcaatggatataaaattaattgtcgctttaactgaaagtggaaatactgctcgtttaatcagcaaacaccgtcctaatgcagatattttagcaattacttttgatgaaaaagttgagcgtggattgatgattaattggggagtaatcccaacaatgacagaaaaaccaagttcaactgatgacatgtttgaagtcgctgaaaaggttgccttggcgtcgggtttagttgaatctggtgataatattatcatcgttgcaggagttcctgttggaactggtcgaactaatacaatgagaattagaacggtcaaataa

SEQ ID NO: 3005 - DNA, 399 bp, Artificial Sequence
  Optimized genes for Lactococcus lactis
atgaaaaaggaaggaatccttaactctgaactagcaaaaatcgcggatgatttaggtcacaccgaccaagtttgtattggagatttgggacttccagtccctagcggcgttaaaaaaattgatcttgctttaactcgtggtaaaccttcattccaagaagttcttgatatttatttggagaatattttggttgaaaaagtttatttagctgaagaaattaaagaaaataatccagaacaacttgcaatattgttgacaaaactttctgctgacgtagagattgtttttgtttcacatgaaactttaaaattaatgaatcatgaagtaaaagctgtagtcagaacaggtgaaaatacaccatactcaaacattattttacaaagtggggtggccctctaa

SEQ ID NO: 3006 - DNA, 669 bp, Artificial Sequence
  Optimized genes for Lactococcus lactis
atgactttagataatcatcattgtgttcaattggttccactttttgagaagctagccgaacaagatttaactaaagttgaaaaaatagtagaacataaaaagataaaaaaaggtgaaatcatcatttctcctgacaaagaaccattgttagtcattgttgctcaaggagccttgaagattagtcaactttcacaatcaggaaaagagcaactgctccgaattattgaagcaggtgattatgaaggagaaggtgcacttttaggggtaacaaatggtcaactctacggacaagcaatgattgatagtacaatttgttttttacgtcaatctgactttgaaacacttttgacaacttacccttctttaagccttcaattattgaaattaaatgctaaaaaatatcttgctgctgagcatcaagctggtttcctggcgcttgacgatgttgaagctcgtttggcgcactattttttgaacttatctgcaacttcagattcaatttatttcgaaattccaatgaaattaaaagaacttgcaaattatattggcacgagtccagaaaccatttcacgtaaaatcaaagtgtttgaagaaaataaaattatctcgcgccagggcagaatgattaaattgcttgataaagaaaaacttgaagatgattttgcttaa

SEQ ID NO: 3007 - DNA, 597 bp, Artificial Sequence
  Optimized genes for Lactococcus lactis
atgtattatcctgaaccaattgcccggctcatcgaaagtttctctaaacttcccgggattggtcaaaaaactgcaactcgtttagctttttatacaattggaatggaagaccaagatgttaatgaatttgctaaaaatttattaagtgcaaaacgtgatttatcgttttgttcaatctgcggcaacttgacagaatcagacccttgtgcaatttgtactgatccaacacgtgaccgtacaactattttagttgttgaagaaagcaaagatgtccttgcgatggaaaaaattcgtgaataccgtggtctttatcatgttttgcacggaacaatcagtccaatgaatggaatttcacctgatgaaattaacgtaaaaacattgattactagattgatggattctgaggtcaaagaagttattattgcaacaaatgctacttcagatggtgaagctaccgcaatgtaccttgctagaatgattaaaccagctggtatcaaggtgacccgcctggccagaggattagcagttggttctgatattgaatatgctgatgagataacgctatcaaaagctgtagaaaatcgacttgaaatctaa

SEQ ID NO: 3008 - DNA, 975 bp, Artificial Sequence
  Optimized genes for Lactococcus lactis
atgttagataagatttcagttgttgtgacttgccataatcatgaagcttatatcgagcaatgtttacgaagtgtctttgctcaaacatatcgaaatatcgaattacttgtttttaatgacggaagtacagatcagtctggtcaagtaattgaaaaaatattaaaggagtctcctttttcagaaacgttctacttcagcgaagaaaaccgtggaattgtttcaattagaaatgatgcactcaccaaaatcaaaggtgacttcctactttttgtagattcagataattatcttgatgaccaatatattgaaatacttcatcaatcattgcaagaacaaaatgttgatatcgcttactgtcaactttgggatttcgttaatagccgtcaagttttgcgtgatgatttagaattttctcttgacaaagaactcgaaggtaaccttatcgatatgtcaagtttagttagagtgtcgaagattttaaatgtccgttttgatgaacagcttaaccataaagcattggaagactacgatttttggttatccttgattttaattaatcacgcaaaaccaatttttgttaaagggataaaattgaactatcgcgtcttgaatacttctcggactgaacgtggcaactgggataaatattatgatagctatttttatttgcttgaaaaacaccaaactttattaccaaaagaagttcttaaagcgagtcaagcaaatgtaaaaatttggctcaaatcttatttagaatcagaccaacaattgacagaaaatattttgaaaattaaagagaaagataaacatatttctaatttacaacgtgaaattgatttgttaaagagtctgctggccgctaaagaagatgaaatcgacaaaacaaaagctgaacttgaagaaaaaaaacaagagattgatattattaaaaattcaaaatcatacaaatttcttcaaaaattaaaaggaaattaa

SEQ ID NO: 3009 - DNA, 1644 bp, Artificial Sequence
  Optimized genes for Lactococcus lactis
atgaaattctcagaattaggattatctgaaggaattgtaaatacactgacagaaattggttatgaacaacctaccccaattcaagagcaaacaatcaaattagctttggaaggtcgcgatgtccttggtcaggctcaaaccggaacaggtaaaactgctgcttttggacttccgacaattgaaaaaatagatgcaagtaatccagctatccaagctttagttattgctccaacgcgtgaacttgctgttcaaggtcaagaagaattatttcgttttggtaagagcaaaggcttaaaagttcgtacagttttcggtggttcatcgatagaaaaacaaattaaaggtcttaaggcaggagctcacatcgttgttggtacacctggtcggctggtcgatttgataaaacgtaaagcaattaaactcgaccagttagaaactttaattttagatgaagcagatgaaatgcttaacatgggtttccttgaagatattcattttattattgaaaaaacgcctgaggctcgtcaaactttgcttttttcagcaacaatgccaaatgatattaagaaaatcggtgttaaatttatgaaaaatcctgaacatatcaaaattgcagcaaaagagatgacggctgaccgcattgatcaatattttgtcaaaaccaaagaatttgaaaaatttgacgtcttgactcgtttgcttgatgtggagcgacccgagctagcgattgtttttgggcgtactaagcgtcgtgttgatgaattgattcgtgggctaaaattgcggggctaccgagcagaaggaatgcacggagatttagaccaaaataaacgattagcagttttgcgagattttaaagctggtcatattgatgttttagtcgcaactgacgttgctgccagaggtttggatgtttctggtgtaactcatgtttataattatgatatcactcaagatcaggaaagctatgttcatcgtattggacggactggtcgtgccgggaaatctggaagaagtgtgacttttgtatcatacaatgaaatgggatatttgagagcaatcgaaaatatgactaaaaagccaatgaaaggattgaaaccaccaacaaaagaagaagcttatcaagcatcactttcagtagcaatggatgacgtattaagagacctttctgatgatagtgctaaagccaaacttgcgaaatttgataaacaagcggcctccctcctagaaaagtttgatgctaaagaactcgtagcgcttttacttcaaggcagagtgaaagatccagataatcaagaagaagttaaaattacagctgaacgtcctttaccttataatggagaaggcaaaggcttcaaaaaaaaaggaaaagggggtggtggacgttataaaggtagagggaatggtgatagagatggaaatcgaggtggctatcgtggcaaccgtgacggtaaagatggtgatcgcgggggtgacagaaaacgcaactggaaagaccgtgatgataacagaggaggataccgtggaaaacgtgatgatcgtcgcttcgacgataggaagcaaggagagaaaacaccacgtaagagaacaacaggaactgaaaaatcagctggatttgttatgcgtagtcgtggagacaaataa

SEQ ID NO: 3010 - DNA, 1038 bp, Artificial Sequence
  Optimized genes for Lactococcus lactis
atgtcactcccgttatatcaacaaatttcagatgatttaaagcaaaaaattgttactaaaacatttaaatcaggtgaccaattaccaactgaaaaagaactcagtgaaacttattcagtcagtcgtatcacagcaaaacgtgccttgaccgagctggagcaacttggtttggtttctcggactcgtggaaaaggaacttttgttcaagaattaaataaaaatcatacaaaattattgaaacgcgtactttttattattccatttgaaggaatgagttttggtgattttacacaggggctggtgcccgcacttaaggttgaaaatactactgtttttatcacttacgaaagttaccttaaagaaaatacagctgacgatatcaaagagaattttgacggcttgatttattatccaatgtatactgaagattatttggacattttattagaactaagcttacaaaactttccagttgttttgcttgataaacaaatctacgatttgggattcccttgtgtcagctctgataatttcaatggtggtgaacaggcagctcaagcactactcaacttaggtcacaaaagaattgcattcgttgcttctaatgatactcatcatccacaaactacaagaaaccgttatcttggctatgttaaagttttaaaagaacaaggaattaaatttcataccaccttagatgattctctttatacagaatcatcagtacttgaacttatacacaatgaaaaagtaacaggtttaatttgtgaaaacgaccttgtggcgcttcaaacaatgaaaactttgcaagacagtcatttttcagttcctaatgatatttctatcatcggttttgatgatattcaagctgcttccctttcaaatcctccacttacgacaattgcccaagatttcattgggatgggacgaattgctggagaattgttgctagattggattaaatctggtcaaacgcctaaagatgtcaaggtaccaattaatttaataaaacgtaaaacaacagaagaattaaaataa

SEQ ID NO: 3011 - DNA, 774 bp, Artificial Sequence
  Optimized genes for Lactococcus lactis
atgtcacaagatttaagccagaaaaataaaccttacctgacaaaagtaaaaaaaatgcgtatcaataaatatttagcacacgcaggtgttgcctctcgccgtaaagctgaagagcttatcttggcaggaaaagtaacagttaataatgttccaatgacaaaccttggttatcaagtttcaactggtgatatcgtagaggtcaacggtgtggcggtctacaatgaagaaccagtttattatcttctaaacaaaccaagaggatatatttcatcagtatctgatgacaaaggtcgtcaaactgttatggatttgatgccacaagtcaaagaacgtatttatcctgtcggcagacttgactgggatacttctggccttttactcctcacaaatgatggtgaatttactaatatgatgactcatccacgtcatggagttgataaagtttacgtagctaaagttgaaggacaagcaaataaggaaaatttacgacccttgactttaggaatgaccattgaaggtaaaaaagtgagtcctgcccgttatgaaattattaaacaagaaaaaacaaagaaccactcaattgtttctttgacaattcatgaagggcaaaatcatcaagttaaaaaaatgtttgctgcagctggtttacctgttcaaaaattaagtagaattcaatatggttcattgacgttggacggacttccaacagggcagttccgtcggttatcgaagaaagaagttagtcaacttataaatgctgctcaaggaaattaa

SEQ ID NO: 3012 - DNA, 465 bp, Artificial Sequence
  Optimized genes for Lactococcus lactis
atggattcaaataaagctgctgaagttttcttgacaactgttattaaacgtggaaaagcagaaatgatgcaccgttttaatacttatagtcaaggagaacatttagtactcggctacctttataaagaagctggtaaacaaattgttccatcaaagattgctaaatttactcatacatctacggcgcggatagcaacaattttgaataatcttgaatcaaaaaacttggtcacccgtgaaatcagcagaacagatcgaagaaaaattttagtggccatcactgacaaaggtcgtcatgttgctgaggagattcgtgttgaagcctgttctaacctagcacgcgtatttgaagaaatgggtgaagaacgtacagaaagttttattgaaaattttaaacttttcttagaaattggaatgaaattagcaaaggaagataaagaaaaagaagaggaaaaaaatgcttaa

SEQ ID NO: 3013 - DNA, 405 bp, Artificial Sequence
  Optimized genes for Lactococcus lactis
atgaatatcaaaaaagcagctgaactttcaggaattaaaacagataatattcgttattatgaaagaattggtttgattcctaaaattactcgtacagaatctggcatacgaaatttcacggaggctaacattcgcaccttaaaatttgttaaacatatgcgtgatgctggtgtgcaagtagagcctttgacaagatatatggcacttgtcaacgaaggaaatccagaaactaaagaagaacgtattgaaatcttgaaaaatcaagttgaacaattacgtactgaaattattgaaaaacaaagtgccctcgactacctaacttttaaaatcgaaaattatgatgaagttatgcttccaaatgaaattaatttaaatcagagctcaaaagaaacaattaagatctaa

SEQ ID NO: 3014 - DNA, 900 bp, Artificial Sequence
  Optimized genes for Lactococcus lactis
atgattttaatcactggtggaaatggtcagctcggaacagaattacgtcatttattggatgaacgtggaatggcatatactgctactgatgcaaaagaacttgatattactgacggcgtagcagtagataaattcttcgacgagaacaaaccagagctagtataccattgtgcagcttataccgcagtggataaggccgaggatgaaggacgcgaattggacgaaaaaattaacgttgatggaactaaaaatgttgcagaagcggcggcacgagtgggagcaaccctggtctatattagtacagattatgtttttggcggtactttaccaattggtcaagaatggccagttgatgccccaaaagctcccgaaagtgaatatggtagaacaaaacatctcggcgaagaagctgtggttgcttcaggggtaaaacactatatcattcgtacggcttgggttttcggttcatacggtcctaattttgtctttacaatgcaaaatttagctacgcggttccctgaattaactgttgttaatgaccaacatgggcgtccaacttggactcgtacacttgctgaatttatggtttaccttgtttctgaaaaggctgactttggtttttatcacttgacaaatgatgctgctccaggagaagatgttacatggtttgattttgctaaagaaatattaaaagatacagacgtattggttaaacctgtcgattcatctaaatttcctgccaaagctaaaagaccatttaactctacaatgagccttgagaaagcgaaggcaacaggatttgttattcctacttggcaagaagcacttgcctcaatgcttgaaaaaggagatttgcgtgaaaataaagatggtgtcaaaggtgaaattaataaaaaataa

SEQ ID NO: 3015 - DNA, 696 bp, Artificial Sequence
  Optimized genes for Lactococcus lactis
atgcttaagttgcagaagaaattaaaaaatgattatggacttgtttttaatgacgaagatttactaaaaactgcttttactcatagtagcttcacaaatgaagagcgcttaccaaaaattgctaataacgaacgtttagaatttcttggtgatgttgccctctcgctcgtcatctctgattacctttatagaacttatccagaaaaacttgaaggagaactttcaaaaatgcgttcttcaattgttagaacagaaagtttagcaaatttttcaagatcttgtggctttggtgaattcttgcggttgggtcacggcgaagaaaaaatgggtggacgagatcgtgaaacaactttggaaaacctttttgaagcatttttaggggcgctatttattgatcaaggaatggatgaagttcgtaaatttatccaacacgtcgtgattcctcatgttaagaacgatgattatgttaaagttattgactataaaacagagcttcaagaagtattacaaattggtggggagaccacgatttcatacaaaatattgaaagaagaaggtcctgctcatgaccgttcatttgttgctgctgttttcaataatggtaaagaattaggacgtggtttgggaaaatctaaaaaagtagcagaacaaaaagcagctgaaaatgcaattaaaggacaaaatcatgtaagttaa

SEQ ID NO: 3016 - DNA, 879 bp, Artificial Sequence
  Optimized genes for Lactococcus lactis
atgaatatcgtgcttaaactagaaactaaagaacgtcaacaactcgccgaaaagtacaaatcatatgaacaagtctctaaaaatccttatattacttttttcgctaaagttggtaaaacaagcatctcagtttatacatcgggcaaagtagtttttcaaggaaacgaggcagaaaaattagcttctgattttggacatattgcccaagttgtaccacaaaagcaaacaaatttaattgggacggatgaagttggaaatggaagttactttggtggattgatggttactgctagttttgtaagtgaagaaaatttaaattttttaaaagaaattggtgttgctgatagtaaaaaattaactgatgaaaaaatttgtcaaattgctcctaaattgatcgaccgtattcctcatgtcgcccttgttgttgaaccagcaaaatacaatgaagtaattgcaagcggctataatgctgtttctatcaaagtggcactccacaatcaagcaatttatcttcttgaaaaacaacttggtcacaaaccagaaaatattgttattgatgctttcacaacagaagcaaattataaaaaatatgttaataaagagcaaaatcatccattgaccaaggtgactttactgacaaaagctgaagaccaatttttggcggtcgcggtatcatcaattatttcaagatatttattccttgagaacttgaaaaagttgtcaaaagaatctggttttacacttccctcaggtgctggtaacctttcagataaaatcgctgcgcagataattaaatctcagggagttgatgcactaaaccaattagcaaagcttcattttgctaatactcaaaaagcaataaaaattgctcaattgtaa

SEQ ID NO: 3017 - DNA, 777 bp, Artificial Sequence
  Optimized genes for Lactococcus lactis
atgggtcaaactatcaaagaaataaaagcaacattagctaaattaactgatttatcagcaaaggagttcttagaatatgaagctgacgaacgtgctggtgttcaagctgccttgaaaagtcgaaaaaaacaaattttggcggagctcgctgaagaagcgcgccttgaacaaatgcttgagtttgaaaaagaactttatggccaagaaattcaacttattgccgggattgatgaagttggtcgtggtccacttgcaggaccggtagtaacagctgctgtgattttaccaaaaaattgtaaaattagaggattaaatgattcgaagaaagtacctaaatcaaaacaccatgcgattctttcagaaatccaggagaaagctcttgctattggaattggtattgttgatgcagaaaaaattgatgaagtcaatatttatgaagccacgaagatcgcaatgattcaagcagtttctaaattgtcagttaaacctgaacacctgttgattgacgccatggttttagactttcctattgctcaaacaaaaataatccatggcgatgctcgttctgcaagtattgcagcagcttcaatcgttgctaaagttactcgtgatgaaatgatgaaagaatttgctctagaattcccagaatacgattttgaacataatgctggatatggaacagcaaaacatttggaagcattgactaaatatggtatcaccagaattcatcgtaagagctacgaaccaattaaaacaatggtcaactttaaatcttaa

SEQ ID NO: 3018 - DNA, 354 bp, Artificial Sequence
  Optimized genes for Lactococcus lactis
atggcaatcaagaaaacataccgcgtaaaaagatcaaaagatttcgaccaaattttttctgctaaacacagttttgctaataaaaaatttgttgtttataaattaaatacaaatcaacctcatttccgtgtcggactttcagtttctaaaaagcttggacatgcggtgctacgtaacagaataaaacgtttgcttcgtcatgcaattgctgagtttaaaccatatttgactgatgaagattttgtcattattgcccgaagcggtgttgaaactttatcatttgaagaagttaaaaaaaatttaaaacatgtattgaaactcagtaaaatttatgttgatggtgaaaatgattaa

SEQ ID NO: 3019 - DNA, 381 bp, Artificial Sequence
  Optimized genes for Lactococcus lactis
atgtcaaaccgtaagctcggccggacaagttctcaacgtaaagcaatgcttcgcgacctaacgactgacctgataatcaatgagacaattgtcacaactgaagctcgagcaaaagaagtgagaagaacagttgaaaaaatgattactttaggaaaaaaaggagatttatcagcacgcagagcggccgctgcttatgttcgtaatgaaattgctattaaagattttaatgaagaaacagaaacttttcctaccgcccttcaaaaattattcaatgatttggctaaacgttatgaaggacgaaatggtggttacactcgtatcttgaaagtagaaccacgtcgtggtgatgctgcaccaatggcaattattgaacttgtttaa

SEQ ID NO: 3020 - DNA, 360 bp, Artificial Sequence
  Optimized genes for Lactococcus lactis
atggcacgcgtaaaaggttcagtcgcaacacgtaaaagacggaagcgaattttaaaactagctaaaggatattatggtgctaaacataaactttttaaaacagcaaaagaacaagttatgaactcttattactatgctttccgtgaccgtcgtcaaaaaaaacgtgattttagaaaactttggattgccagaattaatgctgccgctcgtatgaatggcttaagttactcaaaattgatgcacggattgaaattagcggatattgaagttaatcgcaaaatgcttgctgatatcgcgatagcagatgcagctgcttttactgctttggctgaagaagcaaagaaagcactcgccaaataa

SEQ ID NO: 3021 - DNA, 348 bp, Artificial Sequence
  Optimized genes for Lactococcus lactis
atggctgaaattacatcagcaaaagctactgctaaaacagttcgtgtttctcctcgtaaaactcgcttagtcattgatttgattcgtggaaaacgtgtggctgacgctattgctatacttaaatttacccctacaaaagcagcagtagaagttgaaaatgttttaaactctgcaatcgcaaatgctgagaataattttggtcttgaaaaggccaacttggttgtatcagaaacttttatcaatgaaggaccaacaatgaaacgattccgtccaagagcgaaaggtagcgccagtccaattaataaaagaacggctcatattactgttgttgtcgcagaaaaagaataa

SEQ ID NO: 3022 - DNA, 246 bp, Artificial Sequence
  Optimized genes for Lactococcus lactis
atgaaacaaaatattcatccaaattatcaaccagttgtctttatggatacaacaactggttttaaatttcttaccgggtctactaaaggttcaaaagaaacagttgaatgggaagatggaaacacttaccctttaattcgcgtagaaatttcaagtgacagccaccctttttatacaggacgtcaaaaattccaagcagctgatggcagaatcgctcgttttgaaaaaaaatatggtaagcagtaa

SEQ ID NO: 3023 - DNA, 135 bp, Artificial Sequence
  Optimized genes for Lactococcus lactis
atgaaacgtacttatcaaccacacaaaaaatcaagaaaaacaactcatggttttagaagtcgaatggcaacaaaaaatggtcgtcgggtacttgctgctcgtcgtcgcaagggacgtgcctctttaaccgtttaa

SEQ ID NO: 3024 - DNA, 117 bp, Artificial Sequence
  Optimized genes for Lactococcus lactis
atgaaagttcgtccatcagttaaaccaatttgtgaatattgtaaagtaattagacgaaatggacgtgtcatggttatctgccctgctaatcctaaacataaacaacgtcaaggttaa

SEQ ID NO: 3025 - DNA, 939 bp, Artificial Sequence
  Optimized genes for Lactococcus lactis
atgattgaatttgaaaaaccaaaaatcactaaatttgatgaatctgaaaattatggaaaattcgttgttgagccgcttgaacgcggctacggaacaacacttggaaattcacttcgtcgtgtgctgctctcttcgcttcctggggcagcagtcaccagtattcaaattgaaggtgttcaacatgaattcgcaacaattccaggtgtaagagaagatgttattcagatagttttggcggttaaaggaatcgctatcaaatcatacgttgaatcagaaaaacaaattgagttggacgttacaggaccaatggacgtaacagctggagatatcctcactgatagcgacatcgaaatcgttaacaaagatcattatttgttttcaattgccgagggtcactcaatgcgtgctgtcatgactgttaaaaaaggctacggttatgttcctgatgatgagaataaagttgatggtgctccaattgggaccattgctgttgactctatttatacacctgtttctaaagtgaactatcaagttgaaccagctcgtgttggtggtgattcatcctatgataagctaactttagaaattactacaaatggtacgatagtcagtgatgaagcactttctctatcagctaaaattttaactgaccatttaaatctttttgttgatttatcagaagttgcggcagaagccgaaactttggtagtcaaggacgaagtgaaaacagaacgtgtcttagataaaattattgaagaaatggattttagtgtaagagcttataatggcttaaaacgggcaggaattaatacagttgcagatattgtagaaatgagtgaagctgatatgattaaagtaaaaaatttaggacataaatctgttgaagaagtaaaggtcaaattgactgaacttggtttaagcttgaaaaagcgaaaataa

SEQ ID NO: 3026 - DNA, 564 bp, Artificial Sequence
  Optimized genes for Lactococcus lactis
atgaaaatcaccgccttggaaggtcaaaaaattagtgagctttcaatgattgaagttgctcatgcattattagaacaaaacggtaaagaaatgcaattttctgaaattattcgtgcaattcaagattatcttgaaaaatcagatgatgaaataaaagcttcaatcagtcgtttctatactgaaattaatactgatggcagctttattcctttgggaaataatatttgggcactcagatcttggtacgcgattgacgaaatcgacgaagaagtcattgctctagatgaaatcgaagatgaagaagaggaaaaaccagcaaagaagcgaaaaaaagttaatgcttttggaattgaagacgagatagacccagaagacgaagaagggacaaaagaaacaacagaagaagatatgtcatatgatactcaagctgaagatgaagataaagatgatgtagctgcttatgacgccgaattagcagaagtagaacttgataatgttgatgaagaagtggatattgatgttgaagatgacgaggacgattctgatgatacagatgaggattaa

SEQ ID NO: 3027 - DNA, 1227 bp, Artificial Sequence
  Optimized genes for Lactococcus lactis
atgaatgaatttgaaacacttttaaattcagtcgaagatgtcaaagttcgtgatgttgtcaaaggtgaaattttgtcagtagaaaacggacaagcaacagttgctatcgttggaactggtgtcgagggggtattgactttgcgtgaaattacaaatgataaagatgctgatatcaatacttttgttaagcccggcgatgttttagacctcttagttatcaaacaaattgtcgggaaagaagcagaaggggcaaatgtttatcttctcagccttaaacggctagaggcccgcaaagcttggacacaacttgaaggaaaagaaggcgagatagtaacggtgaaagttacaaaagacgttaagggtggtttgtcggttgattataatggtgtacgtggttttattcctgcgtcaatgattgacacttattttgtaaaagatactaaaaaatttgtgggcgaagaaatcgaagcaaaaattattgaagttaatgcttctgaaaatcgattcattttatctcgtcgtgctgttgttgaagcggaagcaattgaaatgcgtaaggaagcctttgctcaattacaagaaggtgatattgttgagggcaccgtctcccgcgtgactaactttggtgcttttgttgaccttggtggaattgatggattggttcacgtttcagaattgagtcatagtagaattaaacgtccaagtgatgcagttaaaccgggagatgtagttaacgttaaaatcctaaaacttgatcctgaagctggacgtttaagtttaagcctcaaagcgacccaaccaggtccttgggaacaagttgaagaaaaagctccagttggttcaacagtagaaggaacagtaaaaagactgacagattttggagctttcgtcgaactttaccctggtgttgagggacttgttcatgtttctcagatttcttgggaacgtgttgaaaatccaaaagatgttttgaaagtaggtcaagtagtcaatgtaaaagtgttagatgtgaagccagctgaagaacgaatttcactttcaattaaggctttagaagaggcacctgcccgcccagcaagaaataatgataatgacggagaaaaacgagaccgtaaaccacgtgcaccaagaaaagcagctaaaccttcttatgatttaccagaaactcaagaaggattctcacttgctgacttcttaggtgaagactttgatataaacgatttgtaa

SEQ ID NO: 3028 - DNA, 294 bp, Artificial Sequence
  Optimized genes for Lactococcus lactis
atgactaaatacgaaattctttatattattcgtccaaatattgatgaagaagctaaagcagccttagtagagcgctttgatggtatcttgacagataatggtgctgcgaaccttgaatctaaagattgggaaaaaagaaagttagcttatgaaatcaatgatttccgtgaaggaatttatcatattgctacttttgaagcagaaacaacctcagaggcacttagtgaatttgaccgtttggcaaaaattaatttagacatactccgacacatgattgttaaagttgaagcttaa

SEQ ID NO: 3029 - DNA, 393 bp, Artificial Sequence
  Optimized genes for Lactococcus lactis
atggcacaggttcaatatgctggaactggtcgtcgtaaaaatgctgttgctcgtgttcgtttggtccctggtacaggtaaaattaccgtaaacggccgtgaagttgagtcttatattccacacgctgatatgcgtttagtgataaatcaaccattcgcagcaactcaaacagaaggaagctacgacacactcgtcaatgttaatggtggaggggtatcaggtcaagcaggcgccatccgtcatggaattgctagagcgcttcttcaagttgatcctgattttcgctctgctttaaaaagagcgggtttattgactcgtgatgctcgaatggttgaaagaaaaaaaccaggacttaagaaagcccgcaaagcaagtcaattttcaaaacgttaa

SEQ ID NO: 3030 - DNA, 309 bp, Artificial Sequence
  Optimized genes for Lactococcus lactis
atggcaactaaaaaaatacgaattcgtttgaaagcttatgaacatcgtatcttagatgctgctgcagaaaaaattgttgaaacagccaagcgcacaaatgctgaagtttctggtccaattcctttaccaacagaccgtagcgtctacaccgtgatcagagcgactcacaaatataaagattcaagagaacaatttgaaatgcgtactcataaacgtcttattgatattattgagcctactcaaaaaacagttgacagtttaatgaaacttgatttgccatcaggagtaaatattgaaattaaactctaa

SEQ ID NO: 3031 - DNA, 186 bp, Artificial Sequence
  Optimized genes for Lactococcus lactis
atggcaaaaaaatcaatggttgttaaaaatcaacgtccagctaaattctcaacacaagcatacactcgttgtgaacgttgcggccgccctcatagtgtctatagaaaatttaaactttgtcgaatttgtttgcgtgaattagcttataaaggtcaacttccaggagtaaaaaaggcctcttggtaa

SEQ ID NO: 3032 - DNA, 270 bp, Artificial Sequence
  Optimized genes for Lactococcus lactis
atggcaatttctaaagaaaaaaaacaagaaattattgctcaatatgctagaaaagagggagatacagggagtccagaagttcaaattgccgtattgacttgggaaatcaatcatttaaatgatcatattaaatcacataaaaaggaccatgcaacacaacgaggcttgatgaaaaaaattggtcaccgtcgtaacttacttggttatcttcgtggtaaagatgttcagcgctaccgtgaattaatcgcttcacttggactcagacgttaa

SEQ ID NO: 3033 - DNA, 261 bp, Artificial Sequence
  Optimized genes for Lactococcus lactis
atggaacgtaaacaaagaaaagtttatcaaggacgtgtggtatctgacaaaatggataaaacaattactgttgttgtagaaacaaaacgtaatcatccagtttacggtaagcgaatcaactattcaaaaaaatataaagctcacgatgaaaataattcagctaaaactggtgatattgtccgcatcatggagacccgtcctttaagtaaagataaacattttagacttgttgaaattgttgaagaagcagtcattatttaa

SEQ ID NO: 3034 - DNA, 279 bp, Artificial Sequence
  Optimized genes for Lactococcus lactis
atgggacgatctttaaaaaaaggtccttttgttgatgaacatttgatgaaaaaagttgaagctcaagttaatgctgagagaaaaagtgtgattaaaacttggtcacgtcgttcaacaattttcccaaattttgtaggacttacaatcgcagtttatgacggccgtaaacatgtacctgtctatgttcaagaagatatggttggtcataaattaggagaatttgctccaacaagaacttaccgtggtcacgccgcagatgataaaaagacccgccgttaa

SEQ ID NO: 3035 - DNA, 177 bp, Artificial Sequence
  Optimized genes for Lactococcus lactis
atgtcaaaaacattagttcgtaaaaatgaaagcttagatgatgcacttcgtcgttttaaacgctctgtaacaaaagctggtactttgcaagaacttcgaaagcgtgaacattatgaaaaaccaagtgttaaacggaaaagaaaatcagaggccgctcgtaagagaaaaaaatactaa

SEQ ID NO: 3036 - DNA, 1197 bp, Artificial Sequence
  Optimized genes for Lactococcus lactis
atgacttatcatattaaaacaatcgggaataatattgaccaaattgctcttgacgagataggtgaaggatttttagtgaaccaagtttccgaagctgagtctgatgcttttatttgtcgagctcaaccatttcatgattatgaatttagtaaggcgctcttggcgattggacgtgcaggcgctggttttaataacattccaattgaaaagtgcgcttctaaaggtatagttgttttcaatgcccccggcggaaatgcaaatgctgtaaaagagcttgttttatcaatgatgattttcggtacacggaacttaaaacctgccaataaatggttaactggtcaaaaaggagatgataatacaattgatggagctgttgaacatggtaaaaaagcattttctggtagcgaaatttcaggaaaaacccttggtgttattggcttaggaaacatcggttcaaaagttgctaatgatgcacaacgtttgggaatgcgtgtgattggttatgatccttatctttcaatcgaacacgcttggaatttatcacatcacgttaaacgtgtaaatgatttggctgaaatttttgaaaaagctgattatattactgttcatacaccagcaacggatgaaacaactaaaatgcttaattggaaaaatttgagtaaatgtaaaaagggggtcatcctattaaattatgctcgtgatgaaattacagataaagaagcagttcttaaagcaattgatgaaggcatcgttcgttttttcgggactgactttggttctgaaaaattttatcaccatccacaagtattcctgacgcctcatttaggtggaagtacagcagaagcctctttgaattgtacaagaatggcattagattcagttcaaacttacttgaaaactggagaaatcattaattcagtcaattttccaagagtgcttcaagaacttaacacaccttaccgagtcaccttaattaacaaaaatgtaccaaatgttgtcgcacagatatcgctagcggtagccgctgaaaacatcaatatcgcaaatattgttaatagaggacaaggagactacgcttatactttgcttgatttagacgaaaaagatgaaggtaagcttgcagcactcgtaagccgctttgaggctgctgacaatattattcgtgttcgcttgattgaaaatcaaagtttagtttaa

SEQ ID NO: 3037 - DNA, 651 bp, Artificial Sequence
  Optimized genes for Lactococcus lactis
atggctgctaaagggcttttagttatggatgtagatagtacactcatcgaagaagaagtcattgatttacttggtgaaaaagctggaatgggagataaaatcagtgagataacggcagcagcgatgtcaggcgagatagacttcaaagaatcacttcgtgaacgtgtggccctactgtcgggtttacctactacaatttttgatgatgtttataaagaaattcatttgacaaaaggagctaccggcttaattgaaactttgcacgcaaaaggttggaaagtagggctcgtctctggtggtttccatgaaatcgtagacaagattgcaagagatttgaaaattgattatgtttttgctaaccgtttgagcgttgaaaatggacatttaactggtaaaactcacggaacagttgttgacaaagattttaaagtggaccgcttaaaacaatgggcaaatgaaaataaattaaacctttcagaagttattgcggttggtgatggagccaatgatattccaatgcttaatacagctggtattggaattgctttttgtgccaaaccagcagtaaaagcagctgtttcttaccatattgacaagcgaaatttattgactgttcttgaatttgttgataaacttgctgataaggaataa

SEQ ID NO: 3038 - DNA, 1098 bp, Artificial Sequence
  Optimized genes for Lactococcus lactis
atgatttacaactttggcgcagggccttcagtcttaccaaaagaagttttaaaaaaagttcaagaagagttgctcgactttgaaaaatcaggaatgagtgttatggaaatttcacatcgttcaaaagccttccaaaaagtaatagatgaagctgaaaatgatttgcgtgatttaatgtcaattccacaaaattacaaaatcctgttccttcagggaggagcttcatcacaattttctatggttccaatgaatttagcgattggtaaaaaggcctattataacatcagcggtgcttttggtgaaaaagcttacgatgaagcagtcaaattaagtcattttcttgatttgatggcaatttctcttggttctactaaaaaagataattataatcatttattgaaaattgataaatctaagatagacgagaaaaatggggcttatcttcatttgaccacaaataatactattgaaggaacgtcgatttttccagaaaacctcccggagtttgccagcttgccacttgtagctgatatgtcttcaaatattttggcagttgattatgatgtttctaaatttggattaatttatgctggtgcacagaagaacttgggaattgctggcctgacaattgttatcatcagagaagatttattaaatgaagcggaaagcctcagttcaatgatggattaccaaattttagttgaaaatggttcaatgtataatacacctcctacttttgctatctatgttgctggacttgtttttaaatgggttaaagcacaaggtggagtaaaaaaacttgaagaaatgaatcaacgtaaagctcaacttctttatgacttgattgaccaatctgatttttatcaaaacccaattaaaaataaagacgaacgaagtatttgtaatgttgtcttcacttctcccagtcaagaattagatgagctttttacacaaaaagcagaagaaaaaggtttcaaaagtctaaaaggacaccgctcagttggtggtatgcgtgcatccatctataatgctttccctttagaaggcgtggtagaacttgtgaagtttatgaaagaatttgaagaaggttataaataa

SEQ ID NO: 3039 - DNA, 648 bp, Artificial Sequence
  Optimized genes for Lactococcus lactis
atgaaaaataaaatccttgatttacgtgcttattttattgctggtccacaagattttcctaaattatcaattgatgacgcaattgacaaaatttcagttattatcaaatcaggtgtgaccgtttatcaatttagagataaaggaacaatttacaaaaacaaaaatcagcgactagaagttgcaaaacgtcttcaagaagtagcccaaaaagcagcagtatcattcatcgtcaatgatgatgttgaattagcgcgtgaactctcggctgatggcattcatgttggacaagacgatgatagtgtcagcaaaataagagagttgattggtcaagaaatgtgggttgggttgtccgtttctaacgatatggaattggaatctgctcaaaaatctggtgcagattatcttggaatagggccaatttatcctacaaattctaagagtgatgctgctgaaccaatcggtgtagaccacctgcgcaaaatgcttgaacataatcaacttcccactgttggtattggaggaattactgaaaacagcttaactgagctttcaaaaattggcttaggtggagtagccgtcatcagtttattgacagaatcagaaaattataaaaatatggttcaaaagattaaacaaaatattcgttaa

SEQ ID NO: 3040 - DNA, 1176 bp, Artificial Sequence
  Optimized genes for Lactococcus lactis
atgacacaattcacaacagaactcttgaattttcttgctcaaaaacaagatattgatgaatttttcagaacttctctcgagacggcaatgaatgatttattacaagctgaactttcagcttttttaggatacgaaccttatgataaagtgggatataactcaggaaattctcggaatggttcatattcacgccaatttgaaactaaatacgggactgttcaattgtcaattccacgtgaccgtaacggtaatttctcacctgccttacttcccgcctacgggcgacgtgatgatcatttagaagaaatggttatcaaactttatcaaacaggtgtaacaactcgtgaaatctctgatatcatcgaaagaatgtatggtcatcactattctccggcgacaatttcaaatatttctaaagctactcaagaaaatgttgcaactttccatgaacgttctttggaagctaactacagcgtactctttttggacggaacttatcttcctttgcgtcgtggcaccgtcagtaaagaatgtattcatattgcacttggtattacaccagaaggacaaaaagcagttttaggttatgaaattgctccaaatgaaaataatgctagttggtcaactttgcttgataagcttcaaaatcaaggaattcaacaagtttcgctggttgtcacggacggcttcaaaggacttgaacaaattattagtcaagcttatccacttgcaaaacagcaacgttgcttaatacacatctcaagaaatttagcttctaaggttaaaagagctgaccgagccgttattttagagcaatttaaaacaatctatcgtgcagaaaatcttgaaatggctgtacaagcactagagaactttattgcggaatggaaaccaaaatatagaaaagttatggaaagtctggagaatacagataatctattgactttttatcagtttccttaccaaatttggcatagtatttattccacaaatttgattgaaagcttaaataaagaaattaaacgtcaaactaagaaaaaagtattatttccaaacgaagaagcattagaacgctatttagtgaccttgtttgaagattataattttaaacaatcacagaggatacataaaggttttggtcaatgtgcagatacattggagagtctttttgattaa

SEQ ID NO: 3041 - DNA, 1029 bp, Artificial Sequence
  Optimized genes for Lactococcus lactis
atgaaaacaagatctcatcaaatgaagaatgaacttgaaaaagttatgtcaggacgtgatatgactgaaaacgaaatgaatatgcttgcaaattcaattattcaaggagagctctctgaagttcaaattgctagtttccttgtagcacttaaaatgaaaggagaggcagcttcagaactcaccgggcttgctcgcgcgcttcaaaaagcagcaattccaattcctacaaatttaactaatgcaatggataattgtggaactggtggtgaccgaagtttctcatttaatatttcaacaacagctgcttttgttttagccgctggtggggtgaacatggcaaaacatggtaaccgttccatcacttctaaatctggcagtgctgatgttttggaggcgctagggataaatctttatttgccagcagaaaaattggcacaggtctttgataaggttggacttgtttttttatttgctcaaaatctacatccagctatgaaatattttacacctgttcgtcgtcaacttgaaatccccacaatcatgaacctgacaggaccgttgattaatcctattccacttgatactcaattattaggaacgagccggcctgacttgctagaattgaccgccaatgtattgaaaggtcttggccgtaaacgtgctttagttattactggagaaggtggaatggatgaagcaacaccatttggtttaaaccactacgccctcctggagaatgataaagtcactcttcatgaatttagagcgagtgaagtaggaattagcgaagttcagttaaatgacataagaggcggtgaagctccagaaaatgccgaaattttaaaaaatgtcttagaaaatcaaccatcagcattcttggaaacaactgttcttaatgctggattgggtttttatgctaatggtaaagtagattctattaaatcaggtgttgatttagctcgtgaagtgatttcgacgggtgctgcattgactaaattacacgaattacaagctgaacaaatcggctaa

SEQ ID NO: 3042 - DNA, 1188 bp, Artificial Sequence
  Optimized genes for Lactococcus lactis
atggcaaaagaagtttatgatcgctccaagccacacgttaatattggaacgattggtcacgtagaccatggtaaaactactttatctgcagcgatttcaaaggttttaagtgataaaggttattcaaaagcgactgattttgctagtattgacgcggcccccgaggagagagaaaggggtataacaattaatacagctcatattgaatatgaaacagaaaaacgtcattatgctcacatcgatgctcctggacatgctgattatgttaaaaatatgattaccggcgctgctcaaatggatggtgcaattttagttgttgcagcaacagatggaccaatgcctcaaacacgtgaacatatcctcctttcgagacaggtcggtgtaaaatacttgattgtttttttaaataaagcagatttagttgacgatgaggaattaatggaactcgtggaaatggaagttcgtgaccttctttctgaatacgatttccctggcgatgatattcctgtgattgccggctcagctctgggcgctttgaacggtgaaccacaatgggtagccaaagttgaagaattgatggacatcgttgatgaatatattccaacacctgaacgtgatacagacaaacctttgctacttccagttgaagatgtattctcaattactggtcgggggacagtcgcttcaggacgtatcgagcgagggacagttaaagtaggtgatgaagtagaaattgtcggaataaaagaagaaactaaaaaagcagtcgtgaccgggattgaaatgtttagaaaaacattgactgaaggcttagcaggagataatgttggagcattgcttcgtggaattcaacgtgatgaaattgaacgaggtcaagttattgctaaaccaggaagtatcactcctcataaactttttgaaggagaagtctacgtactatctaaggaagagggtggtcgccacacgccattctttgataattatcgtccgcaattttattttcatacaactgacgttacaggaagcgtgaaattaccagaaggaactgagatggttatgccaggggacaacgttcatattgatgttgaacttattcatccagtagcaatcgaacaaggaaccactttttctattcgtgaaggtggaagaactgttggttcaggtattgttgctgaaatcaaagcttaa

SEQ ID NO: 3043 - DNA, 1371 bp, Artificial Sequence
  Optimized genes for Lactococcus lactis
atgaaaaaaaaaattatttcagcaattttgatgtcaactgtagtcctgagtgctgcagctcctttatctggagtttatgctgatacaaactcagatattgcaaagcaagacgcaacaatctcatcagctcaatcagcaaaagcacaggcccaagcgcaagttgattcacttcaaagcaaagttgactcattgcaacagaaacaagcttctaccaaagcgcaaatcgctaagattgaatctgaagccaaagctttgaatgcacaaattgctacacttaatgaatcaattgctgaacgtacaaaaacattagaagctcaagctcgttcagctcaagtaaattctagcgcaaccaattatatggatgctgttgttaattcaaaatctttgactgacgttattcaaaaagtaactgctatcgccaccgtttcttcagcaaataaacaaatgcttgagcaacaagaaaaagaacaaaaagaattaagccaaaaaagtgaaacagttaaaaaaaattataatcaatttgtttcgctaagtcaatccttagatagtcaagcacaagaacttacttctcaacaagcagaattgaaagtggcaactttaaattaccaagccaccattgcgacagctcaagataaaaaacaatctctccttgatgaaaaagccgcggctgagaaagctgctcaagaagcagcaaaaaagcaggcagcttatgaagcacagcaaaaagaagcggcgaaggcccaagctgctagtacagcagcaactactaaagcagttgaagaagctacgagtactgtttcatcgtcgcaagcatcacaaagttcatcttcgtcatctaacacaagtagcaataacacatcttcaaacagttcctcttctagctcaaattctagttcatcaaatagtagtagctcaagtaattcatccaacggtggaggatctactaatactgggaataataatgctgctggtacaggaaatacaggtggttcaagttcatcaggtatcaacagcacaccaattgccaatccttatgcagggggcggttgtacagattatgtttggcaatattttgctgcgcagggaatttatattcgaaatatcatgcctggtaatggcggacaatgggcaacgaatggtccagctcaaggagtacttcatgtcgtaggtgctgcccccggcgtgattgcttcaagtttttctgcagatttcgttggttacgctaatagtccatacggacacgttgctatagtcaaatcagttaactctaatggaactataacgattaaagaggggggttatggaacaacttggtggggacatgaaagaactgtctctgcctctggtgtgacttttttaatgccaaattaa

SEQ ID NO: 3044 - DNA, 468 bp, Artificial Sequence
  Optimized genes for Lactococcus lactis
atggcaaaatttggttttttagatgttcttgaagaagttttagagaagggcttcacttatgattttgaaatgaattgggacaaacgtaattttgcagtagaagtatcttttttgttagaagctgaaaacagctcaggagctttgctgacagacgcggaaggtgttgaaagtgccgaaaatattgtttatgaagatgctgtcctcttctacaatccagctaaatcacgttttgatgaaaatgattatcttgcaacaattccttatggtgaaaaagggttaagtagagaattccttgcttattttgctcaatttcttcaagaatcagctgaccaaggacttgatgatttgatggatttcctagcagatgaggccgcagaagaattttctgtgaactgggataaagaagcatttgagaatggaatcgctgatttatcagaaactgacttttataaatatccacgctactaa

SEQ ID NO: 3045 - DNA, 300 bp, Artificial Sequence
  Optimized genes for Lactococcus lactis
atgatgaatatgcagtcaatgatgaaacaagcacaaaaacttcaaaagcaaatgcaagtttctcaagaagaaattgccaacacaacttttgttggtaaatcagctcaagacctcgtgactgttgaattttctggagaccgtaccttgaaaagccttgatatcaaacctgatgttattgatccagaagatcctgagacgttacaagatatggttactgatgcagtcaatgatgctttaagtcaaattgaaaaagtaacagaacaaaaattaggaaaatttacaaaaggtttgccattctaa

SEQ ID NO: 3046 - DNA, 5952 bp, Artificial Sequence
  Optimized genes for Lactococcus lactis
atgaaaagtcgtaaaaaagtcatttcaattattcttggtttgatgcttcttcttcaatacgttattacgccggttggtgccattgctggtgcaattaacgaggagacaaatgattcagacatcacactctcacaatttaaaattgacgaatctgaatcaaatgcggatttaatgacattcgatttatctttaaaaattaatcaatctattttgaaaagcaaaacaactatcattgaacttgataagtcaataaaaattaatgaaccaaacgaagcaaatcgtcaaaaatcaactgcaagctatacagcagatgaaaatcgcttgacaattgacctcaactctctgaatacaggggaagttaaagtgaacttcagtatctcaaaagaattgttaaaaaattttgaacgcttaacggctaaattgaatgattcacaagttgatgtccttctgcccaaaacttcttcgacatccgaaacaccaagccaatcaacatcaacagtcactcaaaatacagtaacaccagaaattaaagaaaaagaaagcagtacaacaaaacatagtgaacaagcaattaagactgtagaaagtcaagatattcgtaagcttctcgaagacagtggtatttctcctgctacgattattgattctgcgaaagtaatttacttagataaagaaggcaaaccttatcctgatcaaactgacgtaccaattgatgctgaagttcagattgattatacttggtctatccctgaagatattttacctcttaaatctggagattattttgatttcaagctcccagatggtgtcaccattgaacaagcaacttctagtttaggtgactatggaacatatacaattaatgctgacgggacagttcgttttgtttttaatgaaaaagttgaaacttaccatgatattaaaggcacttttcattatgacgctcactttgacaaaactatcgttcctggtgaagtggtcgttgacactccgacagaagaaaactttccaccaagtgaaattcatgttcgaccgacctatgatcaagcgattgataaatctggacattttgacaagactccaaatccatctgaagtaatttgggaaattaatattaaccgtccattgaacacaatggaaaatgcaacattaactgatccaatgcctgaaggaactacttatgaatcagtcgaaatctatccagaaacagttgggaaaaatggcgagattatttcgatagataaggaacatccacttgttaagggaacagattacactgttgatagcaatggaaagattactttcattggtaaatacgcaacaaccgaccaagcttttaatgtagtttatactaccacaattgatgagtcttctttcccagaaaaagaaggtgcggttagttttaaaaacacagctaccctcaatgatggaaaaacagatactaatgaatcagcaagtgttacagcccaatataaaggaccaataaaaaaaaatggtccatttactacaggtaacgaccaaatttataattggaatattgaatacaattacaatgaaaaaaatcataaagcagggagttttattgaagacacaatgtctgatgcaatcgaactcgtgaatggttcagtaaaattatataagattacttttgattccaatggcaaagaaataaaaggtgctcaattaaaagagggtgaagattataaactcgttcaagaccctgacaacccacaaaaattcaaaatcgagtttatcacagacattgattatgcagtaaaagtagaataccaaacaaaagtcaaagatattgttgatggtaatgtcacgattgacaactcagttacaacagatacaggtgataattcagagtcaggtggaaatgctacacaacaaggaattgttaaaaacattgatggcgatatcgactacgaaaatcgtgaaattccttggaaaatcgatatcaattcacctggttattggatggaaaattggtcattagaagataaaatgtcagaaggcttgacttttttagaaaatacatttcaaattatcgacaaaacagcggggaataaggttttaagtccaacagaatatacgctgattaaaacaactgctggtttttctgtcagtttcaattctccactcaaagagggtactgaccacaaatatcaaatcaaatacaaaacgaaatttgatactagtgtgattgataatggttctggtcacgaaggtgatatcaaatttgttaacgatgcttcaatgacttggaaagataaaaatggtggtgatcatacaaataatgaccataaagaattcaaaccaattccaccgttccaatataatggacagaaatcaggtagttataacgctacttcaaagaaaattacatggacaattgccgccaatttcaaccaacaagaactttctaatgccagcatcactgacccaatttcagatgatcaaaactatgtttctggctctgcaaaagtctatgaagctacaatcaacaaaaatggaacttatacccttggagcagaagttacaagtgatatgggaattaaaatcgttgaatctaaaggttctgttaaagttgaactaccagacggtagcactaaagcttacgtattgatttttgagacttctttggaaggaaatcttatcaatcaaaaagaatataaaaataaagctacctttacaaacaaagatattagtcatgacctttcagcctctgtaacgccagcacatcaaggagaatttgttactaaggacggaagtcagtcttcaactgactcaaattatgtaaactggaagttgactgttaacgcatcacagagcacattgaaaaatgttgaagtcaccgataatccatcaagtaatcaatatattgtagctaaagatattctcatttatggtacatcaattgatgcctcaggaaatatcactgaaaacaagaatattatcctagaacaaggaaaagattattcagttgatattcaaactgataatagtactggagctcaaacggtgaaaattaagtttctttcagaaatcaatacagcttatgttgttgagtatcgtgctcttataactagtgataaagctaatgatgttgtcacaaatcaggctcatattaccggagataacgaaaaaataatagagcaagacgttgaaaaagatgttcccgttacgaatcataatggttcggcaaatgggtccaaaggatcagtgactttagagaaagttggtcctggaaaagcaaaattggctggtgcccacttacaactttggagtattggaacggatggtaaaaaagataaattaattagagaaggggatacagataaaaatggtgacttgaaattagggaatctgcgagtaactgattatcttttgattgagactaaagccccaaccggctacacacttgatgaagaattggtaaaaggtaaaaaaattactgtcgctaaagacggtgaagtttcaaattttcctatccaagatgtagaaaatgaacctaccaaggtcatccttaaaaaggttggacttacaatcgaaaatggaaaagaggttaaaaatcctttacagggcgcggaatttaaagttctagatagtaacggacaagttgtttcgggttatgaaaagttgacctctgacagctcaggaaacgttactattgaaaaacttacgcctggtaaatattcacttgtcgaaactaaagcaccagctggatatatcttggatcctacacctatagattttgaattaaaggcaaatgaagaagggattattcctgatattaatcttgaaaaagtcaattatcaaggaagcgctcagttgataaagcacaattctaacggacaagccttgtctggtgctattttcaaagttattgacaaagatggaaatacaattcaaacaaatttatcatcagataaggatggaaaggtgactgcgacaggattgtcaccaggcgactattcatttgtagaaacaaaagctcctactggttatatcttaaataccatcccagttcatttcacaattagtgctgaggaagaaggtcaaccgcaaatggttatcgcttcagacaattttattaattatcaaggatctgctgaattaattaaacaagataatgaggggcaaccattaagcggcgctgttttcaaaattgtcgataaagctggaaaaacaattcaagctaacctaacaagcggaaaagacggcaaagttgtggtggatggtcttgctccaggagaatatagctttgtggaaacaaaagcacccacaggatacattttaaacactaatcctgttcacttcactatttcagataaagaagaagggcaacctaaaactataattgcttctgattcttttgtcaactatcagggaagtgcacaattgattaaacgtgatagtcaaggccaaccccttttaggagccatttttaaagttgttgataatactggtaagttagttaaagaaggtttaacaagcgataaagcaggaaaagttaatgttactggacttgcacctggagattactcattcattgagactcaggctccaactggctatattttaaatactattccaactccttttacgattttagcagaaagtgagggacaaccacaacttgttgttgcttcagataattttattaattatcaagggtcagcggaacttataaaacacgatataaatggtcaagctttgtctggggctatctttaaagttattgatgctgatggcaaaacaatcaaggaaggtctgacatctgatgaaacgggtaaagttttaattgaaggcttagttccaggagactactcctttgttgaaacaaaagcaccagagggttacatccttaatacgcttccagtaaatttttcaatcagtggagaagaagaaggtaaagtcaaagtggttatggcttccgataactttattaattatcagggatcagcagaacttattaaacatgattctcaaggtcaagctttagaaggagctatttttaaagttgtagattcaaaagggaaaattataaaagaagatttggcatcggataaaaccggtaaagttcttattgataatttagcgcctggcgattattctttcgttgaaactaaagcgccctcaggatatattttgaatacaagtaaagtggactttacaatttctactaaagaagagggacaaccaaaagtagtgatggcatctgataatttcataaattatcaaggttcagctgaactgattaaacatgatagtcaaggtcaagcacttgaaggtgctgtatttaaagtaatagactctaaaggtaaatcgattaaagaaaatctagtaagtgacaaagaaggaaaagttttgattgaaaatttggttccaggtgattactcatttgttgaaacaaagccaccttcatcttatattctaaacacttcaaaagtagattttaccatttcaaccaaagaagaaaataaacctaaaatagtcatggcatcagaaaactttatcaattaccaagggagtgccgaactaatcaaagttgacgagaacgggaaatcattgagtggtgcagtttttaatgtgaccaatagcgaaactcatgaagtagtgattaaaggaatcaaaactgatgcaaacggtgttatcaaggctaatcacctaaaaccaggtaaatatactttcgttgaaactgaagcccctgcaggttaccaactctcgcaagaaacccgggcatttgaaattaaagcgtcagctgaaaataaacctcaagtagtcaatactggtaaatttgtaaataaaagattaccgattacacccaagaaacctgagttaccaaaaacaggcgaagaacgtaatacttttttgccaatcgtaggtgtaggattacttatggttggcgcaactctttatgtcttttttaagagaagaaaaatgtaa

SEQ ID NO: 3047 - DNA, 291 bp, Artificial Sequence
  Optimized genes for Lactococcus lactis
atgcttaaaaatatttgggaatggtttttatggtttactggggtaacagatgctggttggagtgcttggtggggaggattcttttcttgtttaccactatttggtgtttttgctgtggtttggcgtcgtttgaaatgccatgcacctggttgtcatcaaatcggcctccatcgcactgctgacggactttatgttctttgtagaaaacaccatccagatgttcctaataatttgacattaaaacatattcaaaaatcacacgtcaacgccaaggcaaaaaaagataaataa

SEQ ID NO: 3048 - DNA, 642 bp, Artificial Sequence
  Optimized genes for Lactococcus lactis
atgtcatctcctaaaattgattataaaaaatctgacaaaaactattatttgccaaaaggcatcagtttaatcgaacttcctgctttgaattatttaatgattgacggaaaaggtgcaccaacttcccccgcttttcaagaagctatccaatatctttacgccaccgcttatatgatttcaatgagttaccgtaatccagacttcattattgaaaatttccaaccatttgttgttccacctttagaagggttatggacttctaaaaatgaaccacgtgctggtaaattagataaaaatgattttatttggcgtttgatgataagaatgcctgatttcgtcgattcagaaatcgtagaaaaagcgaaaaaacttgtagagagcaagaaaggatttgacctttcaaaagttaaatttgaagcaattcaagatggtctttgtcttcaaacaattcatctgggttcatttgatgatgaaggagaaagttttgagaagttgtttgaatatgctaaagaacatgatttaaaagcagttcacaaagaatttcatcatcgtgaaatttatatttctgattttagaaaaacagcaacagaaaagctcaaaactacgctacgaatttttgtggagcgcggacaggaaaaataa

SEQ ID NO: 3049 - DNA, 1074 bp, Artificial Sequence
  Optimized genes for Lactococcus lactis
atgccattaaaactaaaacttaaaccaagtgtccccaaatggagaattaagcgtatgattaaaaaattaaatattgcttatgttggtttcggaaaatcaacaaatcgttatcatattccttatgttaaagaacgtgaaaatatcgtgataaaacgtattgttaatcgaaccttgggcaagcgccctgaacaagcagaacttgaagctaatggaactttattctctactgatattgcagatattatcaacgatgattcaattgatttagttgttattgtcactcctgcttttgctcactacgattatgcaaaagaattgctttctgcaggtaaaaatgttctttgtgataaacctttggttgaaacattagaacaggcgaaagagctcgtagctttggctaaagaaaaaaatcttttctttatgccttttcaaaatcggcgttttgattctgattttttaacggtcaagaaagtaattgaacaaggttatcttggcgacctggtagatataaccgtcaatatggaccatttccgtccaaatgatgcttcacaaggaggaaattttgacggtgcttggtacgggcacggagttcatttagttgaccaaatggtttcactttttggagcacctaaagaagttcaatatgatatccgcgcaacacgtgattatgactctgtggatgactatttttcagttaacttactttatccaaacctgcgagcaactgttgcggccactgaagtagccgcacttccacatccaaaatggctcgtttatggtacaagaggaacatttatcaaaatggatgttgatcaacaagaaaatgatttgaaagttggaatgtttccaggagatgaaggttttggtcaagatagcccggctgactttggccagttgacttactttaatcaaaacggtgaccgtatcgtaaaacatattccaacagttgctggtgattacgggagagtctatgatagtgcctatgaaagtattattaatggggctgataagttggtatcggatgagcaaattttagcagtgattaaaacactagagaatggtttctcaaaataa

SEQ ID NO: 3050 - DNA, 867 bp, Artificial Sequence
  Optimized genes for Lactococcus lactis
atgattaaatttgagaaagtaaactacacttatcaacctaattcaccgttcgcctcacgcgcactttttgatattgatttagaggtaaaaaaaggttcatataccgcgctcattggtcatacagggtcgggtaaatctactttactacagcatttgaatggacttttgcagccaacacaaggaactgtcagagtgggagatatcgttgtaacaagcacatctaaacaaaaagaaataaaaccagttcgtaaaaaagttggtgtggtattccaatttccagaaagtcaattatttgaagaaacagtccttaaagatgttgcttttggtccacaaaattttggaatttcaaaggaagaagcagagaaaattgctgctgaaaagcttgaaatggttggcttgtcaaaagaattttgggaaaagagtcctttcgagttatctggcggtcaaatgcgtcgtgttgccatcgctggtatccttgcaatggaacctgaagtacttgtgttagatgaaccaactgctggattggacccaaaagcgagaattgaaatgatgaaattattcgaatcaattcatcaaacgggacaaacagttgttttggttactcacttgatggatgatgtcgctgattatgcagactatgtttacctcttagaaaaaggacatattatttcttgtgggacacccagtgacgtttttcaagaagttgattttttaaaagctcacgaacttggagttcctaaagcaactcattttgctgaccaacttcaaaaaacaggtgtttatacttttgaaaaacttccaattactcgagcagaattggtcaatttactgaccagtctaagcgttaaatcaggtggtgaaaattaa

SEQ ID NO: 3051 - DNA, 348 bp, Artificial Sequence
  Optimized genes for Lactococcus lactis
atgaaaaaaatttataacataggtgttgaagctacaatggatgtcattggtggtaaatggaaaccaattatcctctgtaatttgcgtcataatccttcacgcccaggggagttacgacgtcaaattcctggaattagtcaaaaaatgcttactcaacaacttcgtgaattagaaattgataatattattgttagaaaagtttataatcaagtaccaccaaaagtagaatatagcttatctccttacggcgaaacattgaatggtttactagacatcctttgttcttggggagaaggacacgtgcagactttgaagtcaatgggtgaagaagttcaagttcttgaataa

SEQ ID NO: 3052 - DNA, 1380 bp, Artificial Sequence
  Optimized genes for Lactococcus lactis
atggaaaatttacaagaaaaacatgaagcacaacgtggtcttcaaaatcgtcatattcaattgattgcaattgctggaactatcggaacaggcttgtttcttggtgctggtaaaactattcaaatgactggtccttcagttatttttgcttatattttaattggtatcgctatgttctttttcctaagaaccattggggaaatgttgtataatgatccttcccagcactcatttcttaacttcgtcactaaatattctggtgttcgtacaggttattttacacaatggtcatactggcttgtaatagtctttgtttgtatttctgagttgacagcgattggtacttacatccaattttggttaccgcaagttccactttggctgattgaaattgtcatgcttgctctcctcttcggtttaaatacattgaactcacgattttttggtgaaacagaattttggtttgcaatgatcaaagttgctgctattattggaatgattgtgactgcgataatacttgttgcaggaaattttcattattcaacagtgctctctggaaaaacagttcatgatagtgcaagtctaagtaatatttttgacggatttcaattatttccacacggggcttggaattttgtgggcgctttgcagatggttatgtttgcttttacctcaatggagtttattggcatgacagcagcagaaactgttaatcctaagaagagtttgccaaaagctatcaatcaaattccagtacgcattttgttattctatgttggtgcattgttggccatcatggcaatctttaattggcattacattccagctgacaaatctcctttcgtaatggtattccaacttattggaattaaatgggcagctgccttaatcaactttgtagtcctgacaagtgctgcatcagctctaaactcttcgcttttttcagcaactcgtaatatgtatagtttagctcaacaacatgataaaggacgtttgactccatttactaagttatctaaagcagggataccaattaatgctctttatatggctacagctttaagcttattagcaccagttcttacgctcattcctcaaataaaaaatgcctttgattttgccgcttcttgtacaacaaatctttttttagttgtttatttcattactttatacacttattggcaatatagaaaatcagaagattataaccccaaaggttttttgacgcctaaaccacaaattaccgttccttttatcgtagcgatttttgctatcgtttttgcgtcacttttcttcaatgcagatactttttatccagcattaggagccattgtttggacaattttctttggactttacagccactataaaaaaatttaa

SEQ ID NO: 3053 - DNA, 813 bp, Artificial Sequence
  Optimized genes for Lactococcus lactis
atgaaatttattgctatcgtggggacgaacgcctcgttctcttataatagaaaacttttatggtatatgaagaaacattttacaaaagaagctcaaatagaaatcgttgaaattactgatttacctctcttttctgaagatatccgtgaaattccagaaggtgttcaaaaaattgcagaagcaattcgagaggaagacggcttaattttttcaacaccagaatacgaccacgcaataacagctgcgctaaaatctctcatcgaatggctttcttggattaaaccacaaccattgaatagcttacccgtcatgattgttggagtatccttgggaaatatgggaacagtttttgcacaagaaaatttacgtcaaattttatcaagtcctggtcttgatgcttttgttcttccttcaaatcaatttttacttggcagagctgctgaagccttcaaccaacaagatgaattgattgatgaacgcaccatcagctggttagaacattgttttaataattttatgatttattcaaaaacactgaagccaatgcgtttgccaagtttgaaaaaagaaaacaataaagagattattgaaagtgaagaatctaaaaatagtactgaaactgacgaagtttggtggactaaagaaacaaatcaaggactaccggtactttcagatgcagatactggtgcatcagaatatgaagaggtcattgaacctgaaaattcagcttatttgcagttccttgaagaaggagaaacttggaaatttgatgatattggtgaacttcgtggtaaatcagaggaggaagattaa

SEQ ID NO: 3054 - DNA, 606 bp, Artificial Sequence
  Optimized genes for Lactococcus lactis
atgtcaaaattgcttgtcgtaaaaggtcatccactgacagctgattattcactttctttgaaaggacttgatgcttttgttaaagcatacaaagctgctcaccctgaagatgaaattgaagaattagatgttttttcagcagatattccaactttgaatacagagttagtttctgcgatgtttgctggagaaaatgctgaactcaccgcaagtcaaaaagataaacttgccagatttgcaggcttcacagaacaatttttatcggctgacaaggtcgtgattgctaacccaatgtataatttaatgattcctgcagaattaaaatcttgggttgatactgtgaatgttgctggtaaaacatttaaatacacggctgaggggcctgttggtttggccaacggaaaaaaagtacttcatttacaagcaaatggtggtgtttatggtgctcaagacccggcaacaatttatatgagcgcgatatttaatttcatcggaagtgacttccgtcaaattgccgtagaaggacatgcttatgatccagaaaaaactgaagaattgctatcagaatttatcaataaagttgaacttgaagcacagactttttaa

SEQ ID NO: 3055 - DNA, 192 bp, Artificial Sequence
  Optimized genes for Lactococcus lactis
atgattcatgaattaaccgaccgtgcccgtcaacatttttcaacaagaaaaattgatgctttttggatttttgaagaaccaacaactggtgcattattcgagggtggacttgtatctgaaaataaagcaatcacttttgaaattaacgctaaaacacttgaagtttttgaaaaaaatgaaaagatattgtaa

SEQ ID NO: 3056 - DNA, 879 bp, Artificial Sequence
  Optimized genes for Lactococcus lactis
atgactgattttaaccaattctttaatttagaattttggcaaaaaatttttgaattgaatgaaagcccccttcgtatcgccattgccattcttgatattgcaattatctcctttttcctttatcaagcaatccgttttgttcagggtacaaaattgatgaccctcgttcgtggtgtgattattttcatctttattcggattattgctggcctaattggcttgacaactgttgaatggttattaaatcaagttattacttatggtgtcattgctggagtaatcatttttcaaccagaaattcgtcgtgctttggaaagtttaggacgtacaacaacgctttttactccaacaagaaagtcgagtcctgacggacatatttcagcttatgaaaaatcatttgcttatatgtctgaacgtaaaataggggcgttgattgcgattgaacaaggacaaaatcttaatgaattcgtttcaacaggaattagattagatgctgatattacctcagagttgttaattaatattttcattccaaatacacctcttcatgatggtgctgttattgttcaaggtaacaaaatcgcagtgacttcagcctaccttccattaactgaaaaatctggtatctctaaacaatttggaacgcgccaccgagcagcaattggtctatcagaagtttctgatgcacttatactggtagtaagtgaagaaacaggtggaatcagtattgctcataatggagaattttttgcagacatctcaaaagaaaaatttcatgacattttagttgctatactcgtccctaaagttgagaagaacgagaaaggaactggcaagaatagaaaaaataaagctggtgggaaaaaaaatggtaaataa

SEQ ID NO: 3057 - DNA, 3543 bp, Artificial Sequence
  Optimized genes for Lactococcus lactis
atgtatcgctcaaaacatcaaaaaggatatactacctcacatgaagttaaaacaactcgctttagaacttggaaaagtgggaaaaaatggctttacggtgcaactgtgcttacactgactgcgagtacactccttcctatcggaaatttagctttccaacctaaaacagaaaaagcgcaagctgcctcagtttctagtggtactttggttcctggaaacacgagctatgatactggtggtcatacgtattctggaactgaatttgcaaactcttctaattacgcactttatggaaaagctgttgttgcaagtaattggattaatcttgtatcatccactgcaaatagcgtaggattaggtattttcaatggttcagtttcagcaatttcagcaactacgggatttactttgaaatcgaccattaaagtagattctggtagctcactgactgattttacaaaatctggtgatgcaattggcgtgattttaactggggcttctaaagcccaattggcagccaatgctcaatcaagtcaggcgactaatgatggattgggaattcgtggtctaccaaacacagtttttttaggacgtgatttatatagcaatttgtcaaatgtttctacagggagtctgacaggaattgatggctctgcaacagtgaatggttggacagacggtccaggtgtggttatggcaatacgaaatacagatagctctgggacattacaagccgctaattatccttctttaggttctgcggctccctattcacctgttaccaacacgcaaaacggtacagcttatacatttgctactgacacatcttatgctcttggtgttgcttcaccaattacatcctctgttcaagaacctattactgtcacatggactcctgacgcaacaaatacagcttcaacaggatacacctctgggacgctcacttttaatttaattgctcaaacaacttcgaatggtgctttgataggagctagtgcagttaatgggggaacaggcggctatacactaacaactcatacaaacctacaaaatagtttaactgttggtttcgtaggtggaactggtggaaattatggtaatctctctgtaagtttgaatggtgctacaatcacaggaagtaagggaactgaaccagttccaatcaattatcttaacaaagttacaggtcaaccaattccctcaatggctcagtcgagtattacggcaaatgtgaacgatacaattggagccgcactaacggctccaagttcaacttctccagataataatacttatacttacgttgtccctgctgcaccaaccggctatcaggcaaattctgccacaaccacaactgtattagcagctaacccagcaagcacgaccaatacttcagctacgacagtgtcaaatttcattgttggcacaactaatcccaatgccttaaatgtttcttatacaccgtcacaacaaactgttttatttaactgggctaaagcatccggaactactcttgctaaccttccaaatcaaatcgcttacggagcgacagggattacagatgcgtcagtcgttactgacaatccattttcaaatacaactttgttatcttcatatgctacagcgctttctaacgctgtaccaactggttataacattactcaaatttctaatggcacgactaccgtctcaggcgcaactaccgcagcaacacttgcagcttttacaagccaaaatcctacagttggagcaacatcaaccttgaacacttataccgtaacattgacagccgtcagccagacagcaacttatacttacggctacacttcaacagctttaaatactccagccattccagctattttgacttctactgggaccactggcggttcagtaaccacaccaacaggttataatacaagtccacaaattccttcgggttactacatctctgctatttatgctgggactagtgcttctggtactctcattagttctagcacaacaaatggaacaaatgctgcttggccatcaggacaggtttatgcgccaacagggaatcaatattatattcaactcgctcctaatacagtaaatgtaacttggtttatctcaattgacccaaatcctgataatgatccacttaatgtcgcacaaggtggcttcactccgacagttggaagcatactaggaggtagtactacgacaaactatcaaagtcaagttatcgataatatgaattcacttactggaaataccctttcaactacagataacgtaacatacactgatggtgcaaccggaataaaatatattgtgactggttatcaataccaagaaggaacaacaacaacagcaacaaattcagctccaataacaacctataaaactttctctgatttattagctgctcatccatatgttcttgctggaacaaagagtaacagaacacaattagttcaccttttaatgactgttgaccaaacgacgattacctccaattcaacaagtggacaacacgttaacccggctaccaattacattcctagttcagaaatcacttcctcaactgatattgatggagctgacgatgatggtttgagttatgccatcaacggatataatgcaatcgttaatattactggtggtcagacggattattggggagatgcaacgaattctcttcaactttcgattggtacatatacagagaattattacgccctcaactaccttggtgtacaagcttatactaactggttaccttcacactcaggaggaactgtcagtcaattccttcaaaccttagatgctacttctctggctaatgacactgttacttcacaaactactttagaggtgcaagatgccactgctatcactactaacaatcatcatattattccacgtgctgcatcatacaatccttcatcagatttagtcggtgcgagtaatgcggacggatcaagtgttgaaaatattgaaacaaatccaattgtcaatggagacgccattggggtattgattaccgattcatctggcaatatactttgggttaataatagtgatatcagcttaccaacgaataagttgcaagaggtcacttatatcgaaaattattatgcattgactgctcaaggacttgttgattacacaaattggcaaacaacaactgccagcggcggacataccgttggtgactttattaactcaggtcaagcgacaacaagtgactatgtcaagtcaactacagaattaacggttacaaattttgttttgccttttgctggtggggcaggtaaccaatttctttatttgatgattggtttagcagcatttggtgctttgggtttttatttttctcaacgaagaaaagctgaaatggatttggaagttattaataaagaaattcttggtaaaaatgataataaacgttcaaatatctatttaacatcacgtcatacacgtccttatgcaaaaatttttcatactaaaaatcggactcacttggctcaagcacaacgtaaaggtacaaatgaataa

SEQ ID NO: 3058 - DNA, 240 bp, Artificial Sequence
  Optimized genes for Lactococcus lactis
atggctttgaacgataaattagatgcaacaaaagacaaagtttcaggtaaagtaaaagaaacaactggtaaggtgaccggagatgaaaaacttgaagcaaaaggaaaaacagaaggcttgatgggtaaagctaaagaaggattagaaaatattaaagataaggccagtgaccttgctgaagatgtcgcggagaaatttaatgatactgttgattctgttaaacataaaaatgaaaaataa

SEQ ID NO: 3059 - DNA, 255 bp, Artificial Sequence
  Optimized genes for Lactococcus lactis
atgaagaaatatgataaaaaaatgaaaaatcgtttgaaacgtgcaactggtcaattgaccggaattttaaaaatgatggaatcaggtgaagaatgtattgatgttgtaactcaacttacagctgtcagatcaagtttagactctctcataggcttaattgttgctgaaaatcttaaagagcttctacttgataaggaagttacagataaagaagaaaaattagaacaagcaatcaaattgattattaaaaaataa

SEQ ID NO: 3060 - DNA, 939 bp, Artificial Sequence
  Optimized genes for Lactococcus lactis
atggttcaagcttataaaaagttttggttaggtgcttttacttttaacaaaaaaacttcaagaaaagatttttggtctgcacttttgactcatattattatctttgttattttattcaaagcataccatttttttaacttacttgacttctaccagttaactacgctttggcaaacatttgcttcattctttcaacttattttcaacctttacttttttggttctttactgagttttatagcgcttactgttcgtcgtttgaatgatgcagaccttccttggggattaatttttttgaactttatccttggcttagggacccttgtcctattgattttaaatctttttccaagttcaccacgggccttgaaatttaaagaatatgaaattaattctagtcaagaatttaataatttgcctgaaactaaaaccttgagcggaatttttaaagattatttcaagaattattttgagtttcgtggtcgtacaactcgtcgaaatttctggtgggttcaactcttttggggtttgacagttatcttgtttttatttctaatttatttatttaatcaatttgaacaaattatgtttggatataattttattggttcaatggtactccgcctttttttcttcttgttcatcctcggcacgttcttcccacaattaacaattcatgtaagaagattacgtgatgctggtctttcaaatttaggattgagcttattattgggtggaacttctgggattcttatattttatcaaatgtttacaaaaacattaaaaatcacttatacaacaggacactatcaattggtacaatatcttctatttcttttagtcatgattgctgtgctctcgctgattttggttgaagttatggcaacaggtgaacttaaaacaaataaaaaaaattcactttttgaaaaaattgattaa

SEQ ID NO: 3061 - DNA, 684 bp, Artificial Sequence
  Optimized genes for Lactococcus lactis
atgccaggttctgataagacagtagattcaggagcaatttatatttcaaatacagaaccagaatataaagcttatgtcccctacctctctggaaatcctaaacaacttattaatggagaacaagctttagtttttgctagagaccgtgatactttggctaatggtaattatggtcgagcagcacatcaacgtgaagttatgactgaattaatgaataaaatgctttccttaaatagtgtgttcaaatatcagagtttcctaaatgatatcagttcagattttaaaacaaatatcagcataaacttggccaatttaactgctttgatggcttacaaagattgtttgaataaggttgtttcaattcaatatcaaggagtaagtcaaatggttgatggtggttcatacgaatttattccagagaatgttgatttagcaatccaaaatattatgcgtcaagcaaacgatgaatcagtaaacgacaaacttgatcaatctgtcattacttatgaaaactattttggctctgaaactgaccaatattatatgccttcagccacggtgacaattaaaggtgaaaaatcagagacctacggcgttgacacaaaaggaagccttgttaaaattaacaaagaaaatgctcaagattatgtttcttcgcaagggggggcgcttgtagcaaattaa

SEQ ID NO: 3062 - DNA, 447 bp, Artificial Sequence
  Optimized genes for Lactococcus lactis
atgacttatgaagacttcattaaagaagcagggctcgcgcgtgaaaattttcgctgggcttgggcattttgtaatgaagttgatggtcctatcacagaaccagaacttgctgataaattgcttgatttggttttagagggcaaaaaatcagcaaccgccagtgccgtcgctgaatatggtgaagatgaaccttttccatcagtcgacggtaaatttgatattttattggatggaaaaggacaaccacgagctgctattacaacttctaaggtttatgttagaaacttcttcgatgtttctgcagaacacgcttttaaagagggagaaggtgaccaaagtttagattattggcgtaaagttcatcaagatttttggtcagatttaaaagtatacagccccaatatggaagtgctatgtgaagaatttgaagtactttatcaaaattaa

SEQ ID NO: 3063 - DNA, 558 bp, Artificial Sequence
  Optimized genes for Lactococcus lactis
atgaatcaaacagaaaaaaaaaaaaaggccattttggaaacaaccttccatctcttgaaccagaaaacgattcgtgaaattactgttgatgaaatcgcgcacaaagctgatgtcagtaaagtaactttatttaaatattttcattctaaaaatcagctcatcaaccaagtgataagacaaaatttaaatcaactgagcttagagattaaaacattgattgaatcaaaccttgactttaatcaaacttaccaagcaatccttcaattaaaaattcaacaacttgaacattatcaacctattttttctgaaaatatgatgactcaatatacaaattcaccagaattacttgatgacgatgctcttagtttacaaaaacaaatttatttgctactttttcaaaaaggtcaagctgaaggaaagatttcatctgattattcacaagaagattttttattaattttatcaattttcaatagtggcgttaaaggactttcaatgaatttgcttatcgagaaagcagaaatagtttctcgtttctttttgaatggttggaaataa

SEQ ID NO: 3064 - DNA, 450 bp, Artificial Sequence
  Optimized genes for Lactococcus lactis
atgactgccatttggaaagaaaaatcttttaatcaattgactttagatgaaatgtatcaacttttgagcctgcgaacagcagtttttgttgttgaacaaaattgtccttaccaagaacttgatggtaaagatcaagttgctaaacatttatggttagaaaatgaaaacggccagttgatggctttgtgtagattactacctaaaggaattagttttgctgaagcatcaatagggcgcgttttagtaaatccagaatttcgtggtcaaaaccttggtcgtggattgatcgaaaaagcacttgaagttcttaaggaggacggagaagaagcggtaacaattgaagctcaatattatcttcgtgacttctatgcttcatttggtttcgtggagaattctgaaccattttatgaagatgatattaaacacgtcaatatgattttaaaattttaa

SEQ ID NO: 3065 - DNA, 657 bp, Artificial Sequence
  Optimized genes for Lactococcus lactis
atgaataaaaagatttattatatttctggtgcaattacaactttagctttcttaattttagcgttgtttgttaaaattgattttactcatggtccttttccatttgatcgtccaattcaaacttgggcattccatttacaatctagttcaggtttaacgtacttcttcagtcatatgactaacatatttggagataaaggtggaatcattgttgctgtgctgttagcacttgtactttatcttctttttaaacaaaaagaagctaccatttggtttgccgcaactgttgttctttcattggccctaaatacagttattaaagctattattggacgtgaacgtcctgatattcaccgattggctgcttttgcaaatgaagcaggaaagtcttttccttccggacatagtatttttgctacaattatctttggttcaattttctttatttgtcttggtaaattgaaaaatcgcagctctaaaatcctccttgggatactttgtattattttgattgctttaatcatgttttcaagaatttttgtaggcgtccactacccatcggacacaatcggcggttttttagagggaatttcaatcctactcttgacttatccaacatatatcaaatatcaagaaaaatcaaaaaaaacaaattaa

SEQ ID NO: 3066 - DNA, 336 bp, Artificial Sequence
  Optimized genes for Lactococcus lactis
atgattgaagcctgtattagaactaaacgtgataaaattgtttcttacgaaatttcaggacacgctgaaagtggcgaatatggtcatgatgttgtttgtgcagcggtaagtgtcctttcaataacaacagcaaataatatttatgaaatggctcatattaaaccagttactcaaatggaagacggttatctttatgttgaaatccctttatctattccagaaaaacaaggagtattggctcaaacactcttagaagcttttgctaactcaatgaaagcagtggagaagagctacggacaatatatcactttgaaatttgaaaatggtgggcagtaa

SEQ ID NO: 3067 - DNA, 375 bp, Artificial Sequence
  Optimized genes for Lactococcus lactis
atggttttaattggtttttcttctgtctttttgatttcttttaatgcttttgttttttttggtttgatgcttttctttgaagttttgcttggatttattacaatcctagtaaatgttccaatgacttcatttttccaaagtcaagttcctttgaacattcaatcaagattctttgctctcctgagtttttcagcaaatcttatcgtaccattaggaattctttatacaggctttttagcaagcgccataggggctgatgttacttatattattaataatattttagtcatcgtgattgtttgttttgcattttggaaagaaattggacgtggtttccgtgctttccttttaaagaaatggaaaatgtcaaaataa

SEQ ID NO: 3068 - DNA, 321 bp, Artificial Sequence
  Optimized genes for Lactococcus lactis
atggttgaaaaaaatgaaatcataaaatctggtgaaattgttatttcaaacccaattggtggtaaattggtcatgaagagaacaagtaccagcaagaaaggaatgaaattcaaagaagtttttgcttcagaggcgtctttgattgccggaaatttaactcaaggaagtttacagatcgcaaatcaagcaatgtcagtagctcaaatttttaaacaagctcctaatggcctttttacagcaactgtggatccagctaaactttctaaatttaaaaaatggaatatttattatcatggttcacgttggcgtaaaaaagcttaa

SEQ ID NO: 3069 - DNA, 564 bp, Artificial Sequence
  Optimized genes for Lactococcus lactis
atgtctagcccgcgtaaaaaagaaggtaaaggtatccaaaatgtttttattcacacgatcgccctccgaatcgctgaaaatgatacaccagttcattcagaattgattggcggggatgttaaaattggtcaagaaaacctccacaatcaagtttcaatggcaattagaaatccacaagcaaaattgatgagtcaacttaatggtgacttcattattacaaaaaaaggagaaactaaacctttagtcaatattcaaaaacaaaacttaagtattgctccaaattcagcttttgaacttcctgtttctttgaatgaccattttaaaccaggaacttatacttacaaaatcgtacttaaaaatgatcatgaagattggcaatttttgaaagattttacaattaaagagtctgaagcgaatatgtataatcagacctcagttgattatacaaagaaaacaaatttaaactggattcattatatgcttgtaggaattactttattcttattgctaatacttttttatttttggggaaaacgttcaaacgatgtgattttaaagagttaa

SEQ ID NO: 3070 - DNA, 834 bp, Artificial Sequence
  Optimized genes for Lactococcus lactis
atgaaaaaacaatctcagctgacaaacaaaaaaattaataaatcagaacctaaaatgacaattattaacttgaaaaatatcaatttgactcgtaacaagaaagaaatcttaaaagatattacttggaaagtcaatcctggtgaaaattgggttattttaggcttgaatggttcagggaaatctagtttactaaaacttatccttgctgaagaatggaaaacaagcggggagatcacagttttaaacactcaatttggaaatggagaaattcctaagctacggaaacgaatatcagtagtcggttcttttattgcagaacgtttccaaccaaatattaaagcagaaaatttagtttatactggtaaatttaatagttcaatgctttataaaccatacactgatcaagaattagatgaagctcgtcaattacttcgccaaatgggagccaaatcgctcattggtcgtaattatgcttctttgagtcaaggagagaaacaagttcttttgattgctagaagtttgattttgaagccagaacttcttatacttgatgaagcaacaaatggccttgacctttttgctaaagaaaaattactcaaacagcttcaacaaattaatcaacttaaaaccgcgccgaccttaatttatatttcacatcatccagatgagatcacggacatttttactcacttgctattattaagagaaggtaaagtaattcaatcaggaaaaaaggaaaacctcttaaatgaaaaaatcttgacagatttttatcaagaaaaagttgaagttcatcgttttgaacaaaaatacttcgtgattccagcaaattaa

SEQ ID NO: 3071 - DNA, 303 bp, Artificial Sequence
  Optimized genes for Lactococcus lactis
atggaacatgaatatctttttgtttattctcgattaaaattattgattaaagatgcacacaaaagtttcaatcaagttgaacgtgaacttggttatccacgtaatacattgaaaaattataaatataagaagaaacctagcgtaggccgcgtctttgaaatggctaactactttaatgtttcaatcgaatttttactaggaattgaagaaaaagataataaaaactcactcgcttacagacttgaaaaacttgaccgtgagaaaaaagaattagaaattttaattttggagggtcaaaaataa

SEQ ID NO: 3072 - DNA, 171 bp, Artificial Sequence
  Optimized genes for Lactococcus lactis
atgaatcgcacttttattaaaggttttttagctggaaatgctttgctcatcgctggtcttgcagcaacagcaattgggataaaagctaaagttatcaaccctattaagaaaaaagaagaacaaattgaaatgggacgtaaacgagcggccagaaaacgtattgctccataa

SEQ ID NO: 3073 - DNA, 948 bp, Artificial Sequence
  Optimized genes for Lactococcus lactis
atgaaaaaagtatcaatcattattccattcaagggacaaactgaagctgaattaatgcttcccctgtcctcgatatacaaccagattggtgttgatttaagtcaacttgatatccatttagtaaatgatggtggaaaaacaattgacctctcaaaatttgatgtattggcagaccgtttggaaatccactatcatgaaattcctaatgggggccctggtgtggcacgtcaatatggaattgataattctatttcagaatatatcatgtttattgatgctgatgatgttctttattatgttggagccctttggccattttataatgcttcaaatcaaggacatcaaatgataagagcgagctactgggaacaaattgctggaaatccttatacttacactgttcacgggaatggtgatcgtaaagcagcttatggtaaatggtacaaacggtcttatattgagatgctaggcttgcgtttcatgcctgacttaccaatttatgaagacacatattttgttggtttagcttgcgaattggcgactgacacctgttttttagaagaaaaagtttatatgtggcttgctaatccaaattcaattacgagaaccgtggaaaataaattcaattatcaagcacatatttacgcacgcgaaaaccgttattggtttgaaatgattcgaaaatggaaaccagaatgtttggtcacagattttgagaactacctcacaaatatgtatcttaagagccagaaatatccaccggtcgatgaaaaagcttggtgggaagagcaacataaattaatcacaagtgtttctgatattttttcaggttggactcaagaacttcaaaaacaagttgaagataaaagtgccaacccacaaaatgaatggcatggtatcgaaactgatggatttaaagaatgggcaacacaatctttgccttggtaa

SEQ ID NO: 3074 - DNA, 2154 bp, Artificial Sequence
  Optimized genes for Lactococcus lactis
atgaagatcaataagattgacacaagacacgggactgctaatcaatctacgttctcacatggtaattgcctcccctatactggattcccatggggaatgaactatttttcgccgtcaacaggggctgctcgtggtgcttggtggtttcatccagaagaccgtacatttgaaggctatcgcattacacaccaaccgtctccttggatgggtgattttagtcatttaacaatgactccagttgctggaccacttccagaaacttcactttggcatacagtttcatcataccgtcctgaagaatctactttcaatccaacacaactcaaaattacgcagttgcgttatcaaattactagtcaattgattccttcaatgtatggtggaatcttgtctatgaattatcaaaacctatcgcttaaagataatggtttaatgcttcatttgcctggttcatatgaattacaacaacttgatgattattctcttgaactatcaattattaattttgctggttgtgaagatgaaaatttcacgttttatttaaaattcaccgccgatcaaccttttgtcctttctggaaatttatcagatgaggacagcagtgttcgtttggactttaaagcagcaaagcaagttcaaattcattttgcaacaagtttcatttcaaaagagcaagcagccttaaatttggaacgtgaacaagataactcagcagaaacttatcttgaaaatgctgaaagtgcttggaataatctttttagccgtatcgaaatcgagcatcacaatcagcaagaagtttctactttttatcataatctttatcgaagcttcttgtttccacaaactttctacgaatttgaccaagaacatcaaaaaatacattatgatacttccagtaagaccgtcaagaaagggccactatataccaacaatggcttttgggatacattccgtactgtttatcccctgtatagcttaatagccgtagacgaatatggggatatgttagaaggtttccttaattcttaccgggcgactggttttctacctaaatggttaagtccagatgaacgcggtctcatgccaggtacacttattgatgctgtaattgctgatgcagcttctaaaaacattagacctgatttgatgcctgaatttctggaagcaatgaaaaaaggtgcaacttctcaatcagagaattcaaattacggaagacgagggacaaaagattatttgaaacttggttacgttcccttaactcatcatgaatcagtcaatcatacccttgactacgctttttcagactactgtatttctcaggtggccaaacaaacgggtgacaaagaaattagtgacttctatgcacatcaagctaaagattaccaaaatatttttgatagtgaaacaggttttatgcgtgcaaaagacgcagatggtaactttagagcggattttttagatattcgctggggtcgtgattatgctgagggctcagcttggcaaacatcttggtcagtattacatgattttgcaggacttatcaaattgcacggctcacgagaaaactttgagaataaattaattgaactttgtaatcaacgtccaaattttaatgttgaaggatatggatttgaaattcacgaaatgtcagaaatggcagcgattgagtttggtcaagtggcaatctctaatcaaccaagttttcactatccttacttattttcttatatcggtaaaccttggatggccacacctttgattaaaaatttactgacagaaacatttaatgatagcccaaaaggatacccaggagatgaagataatggaactatggctgcatggtatattttctccagtttaggattttatccagtaactgcggcttcaaaccaatatgttttgggaattccattatgggataaagctagaataaatctcagttcaggacaacagcttacaattttagctgaaccaaacgctcctcaacaagtttttgttaatcaaatcacttttacagataaaaaagtaaatgatacctttattaaacatgaagaattgataaaaggcggaacattaaaatttgatttagggattgttccaaacccattgaaatatacaaatgaacaacttccttattcattgactgaaaattaa

SEQ ID NO: 3075 - DNA, 402 bp, Artificial Sequence
  Optimized genes for Lactococcus lactis
atgaataaaaaagaattagaaaatgctttgatttttccacaaggagaaaaaaatccttatggtgcttatttcacaggacagtcttatcttgaaggaatgattgctgataaagaccttccttttggtgtaggaaatgtcacttttgaaccaggttgtcgtaatcattggcatattcataaagatggttatcaagttttgttagtaaccgccggggagggttggtaccaagaagaaggtaaagaagctcaattacttcatgcaggagatacaattgttactcatgcgggagttaaacactggcacggcgcaacaaaggacagttggttttcacatgtggcaatcactgctggtgaagcagtttggctagaggaagtttcagatgaacaatatgaaaacctctaa

SEQ ID NO: 3076 - DNA, 753 bp, Artificial Sequence
  Optimized genes for Lactococcus lactis
atgtcaaataatattgaaaataaagttgttttgattactggtgcaagtagcggaattggtcaagctacggctgaattattagcgaagaaaggagcaaaaatcgtccttgccgctcgtcgcgagaaccgacttcaagagctagctgataaaataaaaaaagcaggtggacaagcaatctatcaagttaccgacgtaacaaatccagaagaatctaaaaaacttgttcaatatgctaaagaaaactttggtaaaattgatgcgatttttttaaatgctggtatcatgccaagttctcctctctcagctttacacgttgaagaatgggaaaatatggttgatattaacttaaaaggtgtgttaaatggtttggctgcagtgctccctgaatttacagcacaaaaatcaggacatgtaataacaacttcttcggtagccgggctgaaggcttacccaaatggaggcgtctacggcgcaactaaatgggcagtacgtgaattgatggaagttcttcgtatggaaagtgctcaagaaggaactcatattcgtaccgcgacaatttatccagctgctattaatacagaacttttgaatactatcactgacaaagatgcagcagaaggaatgactgccctttatgaacaatatgggatttcacctgaagcaattgctagaattgttgcttttgctttggagcagccggaagatgttaatgtctcagaattcacagttggtccaacaacacaaccttggtaa

SEQ ID NO: 3077 - DNA, 1047 bp, Artificial Sequence
  Optimized genes for Lactococcus lactis
atgaaaagtgtttattttgttgaaaaaaataaaatgcaagttcgtgaattcccaaaagctcaattagtaaaagaaactgatgctatcattaaaattgtccgagcctgtgtttgtgggtccgacctttggtggtttagaggaatttcagaaagacagcctggcccagttggtcacgaagcgattggtttaattgaagaagttggaactggagtcaagaactttaaagtaggtgatttcgtaattgttccgttcactcatggttgcggacattgtcctatttgtttagcaggatttgaagctaattgcccaaatgcaaaagatggagtaaacggtggttatcaaggagagttttatcgcgcgataaatacagacggagctttggttaaaattcctggtcaaccaagtgattattctgatgatcaacttgcaagtttgactgctcttgctgacgtcatgccaactggttttcatgctgctaaagcagctgatgttcatgaaggagacacagttgttgtatttggagatggtgcagtagggctttgtgctgtcatttcagctaaattactcggtgccaagagaattattgctatgtcacgtcatgaagatcgtgcagcgctagcccgtgattttggtgcgaccgatattatcgacgaacgtggagaagaagcaatccaaaaaatcatgagcttgacaaatggttacggcgcagatgcagctttagaatgtgtgggcacgaaacaagctatcgaatcagccttccaagcagtcagagctggtgggcgcgtgggccgagtaggggttccacacgatgttgattacaatgaatggattgattcacttttttggaaaaatattcaattgggtggaggtgttgcctcagttgctcgttgggataaagaaatcctgttagaggcagtgctctctggtgaaattaatcctggacgtgtttttacagctgaattttctcttgatgaaattcaaaaggcttatgaagcaatggaccaacgtacagcaataaaatctttattgcggatttcggaggtttaa

SEQ ID NO: 3078 - DNA, 165 bp, Artificial Sequence
  Optimized genes for Lactococcus lactis
atgacttctcaaaatgaaggagtagttgaagcagaaatcaaaaattttggacgtcaaatgattattgagggtgaaattcatgaatgtgaattgaactggaataaaacttggttaattgaaaattgtatgacacaagctggtgctttttcacttggcttcttttaa

SEQ ID NO: 3079 - DNA, 600 bp, Artificial Sequence
  Optimized genes for Lactococcus lactis
atgaaattatccaaggtcgcgatttcaacaggacttgttgctagcttcatgtttattggtggtgggattgctcatgctgatacaccaaaatcaactcatgaagttgcaattgaagtgataaacggaaattacggcaacggtgacactcgtgtgacaaatttacaatctaaaggatttgatgttaaagcaatccaaacagaagtaaataatattttgactggtacaacgacccaggtttcagcaaccactaaaacagctgaagaacaaccaacaaaagttacttctgtagcccctactcaagcaacacaaagcgtcagtggaggattgaatatgagtcaaacttcaggtcaagttgatattcaagctcttgctaattatatggcttcaaatacagcaaatgctgctggttattcagcttctgaatgggcatacatcatcactcacgaaagtaatggtggaattgattcagtaaactctagttcgggggcttatggtgcttttcaattacttggacatggtgaatatgctggaatgactctagcggagcaaattgcaatggcatcaaaactccctgctggctcttgggttgtttataattaa

SEQ ID NO: 3080 - DNA, 1539 bp, Artificial Sequence
  Optimized genes for Lactococcus lactis
atgaagttgaaagatattgaaaaatcaacaaataaaaacttatatcttctttttctttcagttcttgtaggacttacagctggttttttagcgtctctttatagacttgccttagaaaaagcagaaacttggggattaagtatttaccgctttgtttcaagtcatctgattttcattcctctattgattttgggtttggcctttttagccttcgttgtgactttttttatgaaaaaatatccaatgtcttctggttcagggattccacaagttaaaggacaacttcaaggatactttaaaaataattggtttactacagcatttgctaaatttattgcggggacattagcaatgttcgccggtttaagcctcggtcgcgaaggaccttctgtacagttgggagcatcaatgggtcaaatggtgagttcacgtttggctgagactgaacgtcataaacgtatcctcattgcctctggcgcttcagctggactaagtgctgcttttaatgctcctttatcgggggttatgtttacacttgaagaagtctttaagtatttttcacctttgatattattaacttgcatgacctccgcgatggtagcagatatggttgctcgtatcatgtttggttcaggaccagtttttcattttcaaattgtcggctcaattgagttgtcaaattattggcttttaattattctcggcatcattttaggtttctttggagctttttataactggactttattgaccagtcaaaatttgatgaaaaaaattaaatctccatttcttcgtgttttgttgacttttctagtcgttggtgcaacagggcttctctttccaaatattatcgggagtggtcatcggttaatggattctttctcacttggaatgggattggctttcctttgtcttattttaattggtaaatacttgatttctatggtttcttatgcaagcggtgttccaggtggaatttttttcccgctcctggtgcttggtgctagtcttggcgcagttttcgcaactattgtgatttcattattccatcttccttcacatttatttgcaaaccttgttattcttgctatggcaggtacatttacggcaattgtaagagctccaatgactggtatactgctattagttgaaatgacaggttcttttgaccaccttttgccacttgctttagtaagtttaatcgcttatgttgtcgctgatttactgcagtcggaaccaatttatgatagtttgcttgataatatgcttaaagagaaagaaatcgacgttgatgatagcgataaacaaatgatgtttgaaacaattgttcaatttgattcagtagctgaccgtaagaaattatcagaaattcatttgcctgaaggttgtttacttgtctctgttcaccgaagcggaaaagacatcatcccccacggaaatacagaattacaagcaggagattatttgacgttcttgataagacgagaagatgaagttatcgcacgtgaacaattacgtcaagtattgaatgaaaaataa

SEQ ID NO: 3081 - DNA, 270 bp, Artificial Sequence
  Optimized genes for Lactococcus lactis
atgcttctctctatcgcaattttattaattatttggggagcttatttgattggtaaaaaatataaagatagtttctttatttcatacggtcgttcaaaacgtggtttgatcatcattgtttctagcctgctattgctttcatttttcgtctttgttaaaaatgattcactttttccagttgtattattttcaatttttttaataggcttaggaatttattatcttattcatgattctaaaagagacagtgaaggaaagaaagaaaattaa

SEQ ID NO: 3082 - DNA, 267 bp, Artificial Sequence
  Optimized genes for Lactococcus lactis
atgaaaaaagttttagtaaaggcagttcacggctatcaacgctggatttcacccgccttaccaccagcttgtcgatactatccaacttgtagtaattatatggttcaagcaattgaaaaacatggtcctgctaaaggacttgcaatgggaacagctcgtatcctcagatgccatccattttgtcaaccaggttatgatttggtccctgaccatttttcacttcgtcgtaactgggctgaacctgagaaagaagaagattctaattaa

SEQ ID NO: 3083 - DNA, 714 bp, Artificial Sequence
  Optimized genes for Lactococcus lactis
atgaaaaatatgaatgataacaatgttatctttgaccaacgttcagatggcttaaatgctttcttttctaagatttatgctttaatgggagcaggagttttagtaagcgccctcgtatcttggatcatgattactttttttcttgacaacatgactgcgattttacagtcaggttcactcttcttcctagtgctttggattattccacttgttatggttgtttcgcttcaaggactggcgatgaaaaattcaaaaatggctttgcctattttcattggttatgcagcatttatgggctttttaatttcttttacccttttgatgtatacagcaacagatatcactttggcctttgtaacggctgctgcaatgttttttggtttgagtgtttatggacgctttacaaaacgaaatttatcagctatgggtaaagcttttggggtcgctgtttggggacttataatagccatgttcctaaactttttctttgcaagtacaggtttaactattttgatcagtttagttggtgtggtcatttttgctgggctcatcgcttgggataatcaaaaaattacacaagtctacaatgcaaataatggtcaagtttctgatggttgggcaatttcaatggcactttcactttatcttgattttattaatatgtttttgttcttgttaagactttttggaattgctggtggaaatcgtgattaa

SEQ ID NO: 3084 - DNA, 933 bp, Artificial Sequence
  Optimized genes for Lactococcus lactis
atgactttgaaaattgataaagtacgtaaatcatttggtgacaaaatcgccgttgataatttaaacatggttgttaaacctggtgaagttatgggacttatcggtcaaaatggtgctggtaaaacaacaacttttagaatgattttaaattttatttcagcagatcaaggaaagattacttggcaagatggtccaattacacaagaaatcaaacaaaagattggtttcttgcctgaagaacgtggcctttatcaaaaaatgaccgtagaagaccaaattctttactttgctgaattacacggaatgaaacgagctgatgctagaattaagttacaggattggatgaagcgtttggaagtagtcggaaaaccaacagataaagttcaaacattatcaaaaggaaatgctcaaaaaattcaatttatcgcgaccttgattcatgaaccagaatttttaatcttagatgaaccttttactgggctggacccagtcaatacagaacttctaagaaacgaaattaaaagaagtcgagataaaggggctgctgtgattttttcaaatcataatatgtctgatgttgaactcctctcggaccatttattgatgcttaaaggtggacaaactatcctaaatggaacagttgaggcaattcgtgcttcttatggtcggactcgtatttatcttgaaagtgaccttcctaatgaagaattgtcagtaattacgggagttgaatcaattgaaaaacgtggttctggtcgttcaataaaaataagtgaagccgaggtgggccgcgaaattttccaaaaagtcgctaaagatggatatgttcaagcatttgttcagagcccaccgagtcttgatgagatattccgtatggaagcagcagaaaataatcaagaaaacttaagcgcacgctctgaagagattaaataa

SEQ ID NO: 3085 - DNA, 399 bp, Artificial Sequence
  Optimized genes for Lactococcus lactis
atgaataaatttatctggtcaatttttattccagttttgatctttgctggacttttaaccgtgattggtttttcacttgaaagtcaacacttttattggttgcaaagtgttgaacttatttatctttttggttctctgattttcacttttgcagcattttggatttggcatttaggaattaaatcaagaaaaatgaagtccttgaaagtattatggttaatactaagcttagtcttcttgattgatttaatcaacacaggggtttaccttgctcaaggacaaggttggctttggggaatgtcaagtttttcttctgctggtcctgcgttctttgcctcaatgcttttgctctctctctcatttttaggcttccgtggtcaaatgaaaaaagaaaattaa

SEQ ID NO: 3086 - DNA, 909 bp, Artificial Sequence
  Optimized genes for Lactococcus lactis
atgacttattatttgcttgcaaatccaaattcaggggctggtaaaggtgctcggactttagaaacattgattccttatcttgaaaaaaacaactatgaataccgactttttaaaacaaaagcagcaggagaagagggggccttggtacgtcaaatcttggatttaaaaaatcctgatgatcatcttgtaattattggaggagacggaacaatcagtttagtgataaatgaacttccagaagaagaagctttctcttatattccaagtggttcaggaaatgattttgctcgcagcttaaagcttaaacttgacccaattgaaagttttgaagccgcgcgtcgtggaattaatcatgaaatttttatcatgaattatcaatctaaaggcctttcaggttatgctttaaataatattggtataggccttgatgcaactattgttaaatcagctaacgaaggcaagctcaaacaagttctaaataaattgaagcttggttctttcagttacattttaacagcgcttcatgttttgataacgaaaaaaccttttccagcactcatcgaagttgagaatcaagaaatttctttggaaaatgcttttttaatgacttttactaaacatccatattttggtggtggagtaaaaatttcgcctgaagcaacaaatgaaaatgcagatattcatttggttgaatataacaaacatcatttactgagaaccttttctttaattccctcagtcctcagaggaatgcacttgaaacacccgttattcctacatcgtgtttctccacaattttcagtcgagcttgctgaaagccagcctgttcaaattgatggtgaaatccacgaattagttgctgctgaccgtttatcaatttcaacagaacgtcgaatgattatctactaa

SEQ ID NO: 3087 - DNA, 588 bp, Artificial Sequence
  Optimized genes for Lactococcus lactis
atgactatcaatacaaataatttgacaatcacaatttcagctgcttctaaaaaacaatatcctgagaatgattggccagaaattgctcttgctggacgatcaaatgttggtaagagtagcttcataaacactttgctaaaccgtaaaaattttgccagaacatcggggcaaccaggaaaaacacaattattaaatttctacaatattgatgaccaacttcattttgttgatgttcctggctatggttatgcaagagtaagtaaaaaagaacgtgaaaaatggggaaaaatgattgaagaatatttaaccacgcgcgagaaccttaaagcagtggtttctctggtcgatattcgtcatgaaccttcagaagatgatttaatgatgtatgaatttttgaaatattatcatattccagttatccttgtagcgactaaagctgataaagttccacgtggtaaatggaataaacacgaatcaatcattaaaaaggcaatgaaatttgattcaacagacgattttattatttttagttctactgacaaaactggttttgaagaagcttgggaagcaattttacgttacctctaa

SEQ ID NO: 3088 - DNA, 183 bp, Artificial Sequence
  Optimized genes for Lactococcus lactis
atgggtttgactttcagaaaacgtgatgattttgataaaatgatggatgaccttggagtctctactgttgatttagtaacagacgatgataagaaatcagttccaagtcctgaaaaaaaagaagacccttttgctaaatttttaacaccaaaagaaaataataaagaaaaagatccaaactaa

SEQ ID NO: 3089 - DNA, 927 bp, Artificial Sequence
  Optimized genes for Lactococcus lactis
atgacattaaattctcttgatgttcaaaataaaacttttaatccacaatttcgtggtttctctaaacatgaagttgatgaattcttggatatcgttgttcgtgattacgatgaatttgctcagacaattaaagaccaagaacgtgaattgaaagcgctacgagaaagagtcaaatattttgatgatatgaaagatagtttgaataagagtattgtggtagcccaggatgctgctgataacctgcgcgaacaagctaaatctgaagccgacaccttacgaatcaattcagaaaaagaaagtgctgacattatcgctaatgcaggacaaaaatcatcgttaatcattgaagcagcgaaaaaagaggcaggctttattttaaacgccgcatcagatgatgcacggaagctcgtcagagatactgatgatttaaaacgtaaaatgcgtctttatcatcaacgtatgacttctattattgaaaaccaacttgcttcaattcaatctgacgactgggcagagatttttagaccgactcaagattatgctattaatcctgaagaaaagcttcaatcaattattgaggaacaccttgaaaatgctgaatcaactttagcaaaaacacaagcgataaaacctttgacagatgaagatattgctcaagcaaatgaaacgtccgacgaaacagaaacaatagtttcagaagaaattgtttttgaaactgaagttccagatgaagttaaagaagaagtagaaatcactgacgaggccaatacaacagacgatagcaacgaagaatctgaggtagaggctccaaaagcagatgacagcgaaattttcccagaattagattcaaaagctcctgctgaaactgcagaagtggttgaaaaagataatcaagaaaccattgatttgagtgaacttaaaaattaa

SEQ ID NO: 3090 - DNA, 678 bp, Artificial Sequence
  Optimized genes for Lactococcus lactis
atgactattaaagaaaatgtcaaacgaattttaagtaatgttgacgcagctaaagctgcttcatcttattcaaatcaaagtgtgtcggttgttgcggtaactaaatctgtagacgccaaccttgctcgtgaagtttttgaaaatggtgtttctcacttggctgaaaaccggaccgagctttttttagaaaaatatgaagcacttaaagatttagagatcacttggcatctaatcggaaatcttcagcgtcgcaaagttaaacaagtaattaattatgttgattatttccatgctttggattcacttaagttagctcaagaaatcaataaacgtgcagaacatacaattaagtgttttattgagttaaatatttcaggtgaagaatctaaacatggtttcagtgtcaatgaattaatggaaatcctccctgaattttctgaacttgaaaacattgaaattgttggcttgatgacaatggcaccatttgatgcaacagaatcagaatgtaatgatatttttggtcgtatgaaaaaattgcaagttgaaattagtgaaatgaatctgagcagaattccatgcacggagttgtcaatgggaatgtcacgtgattacgaaatagccataaaaaacggggcgacttttgttagaattggaacagaattctttaaaaatctctaa

SEQ ID NO: 3091 - DNA, 522 bp, Artificial Sequence
  Optimized genes for Lactococcus lactis
atgtttgaaaaatttgatttgttgaaacattttggtgtttatggcgtggcaattgataatgaaaaattactcgtaatagagaagaactctggtccttatcaaaatagatatgatttacctgggggaagtcaagaagtaggtgaatcaatggttgacactcttgaacgtgaagttttagaagaaactggttttacagttcttgcttcaacaaataatcgtctttattcagcttggatttatgaaaatgaccgacgcgtcgttggacatcatatttttaatttattcgatgttaaacttaactctgtcgccaaaaaattgccacaaattgttgctgatggaaaaaatgattcagaccgtgcggtttggaaatcaattaaaaacctaagcgttgaaaattctagtcccttggtattaaaggtcatcgctgaaattaataactatccacacgtggataaagcagagatctaccgtgattggaaagtaaattatggaagtaaaaattacccaaaaccacttgtttaa

SEQ ID NO: 3092 - DNA, 714 bp, Artificial Sequence
  Optimized genes for Lactococcus lactis
atgaaaaaaattattacaaaagattatgcaacaatgtctgaacttgctgctgcaatcgtccttgacaaaatgatgcttagtaaacgcgtgaacttatctttgaccgcaggaaatacacctttgggaatgtatgaaatactcatagataagctccagaaaatgaatttcgaccgtagcaacattcactactataattttgatgaagttcccctagcgggggagcgttacggcttgactatgtcagctttgaaaacagctttctatgatagagtccatattgatgatggaaaccttcatgaattaaatgctcaaaataatcaagttttcgaccaaaaaatcttacaagatggcgggattgatttgattgttatgggaattggtgaagatggtcatttttgtgcaaatatgcctggtcacacttcatttgaacgtgaaatttttgcagtaccatttgaggaaggagatgagatttatcaatcaattaaaaatctgacagataaagaaccagctagtccttatgttacatttggtcctcgaacggtattggcttcaaaacaacttttagtttttgctgacggtaaaaaaaaagctgaaatcatgaagaaagttttagaaggtccaattactgaagaaattccagcctctatccttcgtactcatccaaatgttacttttattttagatgaagaagcagcggccttacttgaaaattaa

SEQ ID NO: 3093 - DNA, 507 bp, Artificial Sequence
  Optimized genes for Lactococcus lactis
atggttcaagaaaatacaaaaacagaagtaacagaggtcaaaggttcattgacttatgaagataaagttattcaaaaaattgttgggctagccttagaaagtgtcaatggattactcagcgttgatggtggattcttttcaaatcttaccggtaaacttgttaacactgacgatgttacagctggtgttggagtagaagtgggcaagaaacaagttgctgttgatttaaaagtcgtgactgaatataaaaaaaatgtaccagatatttaccgtaaaatcaaagatgtcataagaaaagaggtttctgatatgactgatttggaagttgttgaagttaatgttacggtcgttgacattaaaactaaagaacaacaaaaggatgatgaaaaatcacttcaagatcgcgtggttggtgcagcacagacaacaggaaaatttacttctgaccaagtagacaaggtaaaagaaaaagtagatgacatgggagatgatgctcgtgttaaataa

SEQ ID NO: 3094 - DNA, 1005 bp, Artificial Sequence
  Optimized genes for Lactococcus lactis
atgattttaagtgttttaccaagtaacttgcttggtgtcactaaagtaaatgctgaatctagtcaaactgaagtcaatcaggagttaaccaatttccaaaccgaacttgattctaaacttgcacaagcaaataaaatttattcacaagctcaagaagcccaggagaaagtgaagcaatctaagagcaaaatcactgaatatgaatcaaaaatagcagaaacagaaaatgatattgttcagctgaaggcttcagtggctaaacaaatgcgtgctgttcaatcaaacggtggtgcaactttttcttatattgacgttgttgccagcagtaaaaatctttctgaaatgattactcgcttaactaatttaaatgttgtattgacagctgaagcagatcaagcgaaatcacttattgaaaaagaagcatcattgaaaacaatgaaagttaaattagaagaaactcaagaaagtttggtaaaaaatcaaaatgattatcaaggacaagttgactcgcttcaaagttcaatttcaagcttaaaagataaaatttcttctaacaaacaacttttgtcagaaatgcaagaaaaagcagctgctgaacaaaaagccagagatgaagcgctcgccaaatctgtcgctgaggtcaaagcaaaagcggagactgttaaaaatacatcatcaaatcctccaacagttcctgacccaccaaaacaaacaacgccgacaactccatcaggtggacgtacacttaatgtagaagctactgcttatgctttgaatggaatcacagcaacagggatagatttatcaaagaatccaatttgtattgcagttgatccttcagtaattccactaaacagtttagttgaagttcccggttacggaattgctattgctggtgataccggcggcgcaatcatcggaaatattattgatgttcattttcctacaaatgaccaagcaatcgcttggggacgaaaaaacattcaaattacggtgctctcctaa

SEQ ID NO: 3095 - DNA, 576 bp, Artificial Sequence
  Optimized genes for Lactococcus lactis
atgaaatcaaaaaaaacattgattggattaatgacttctgtaactttccttgtttttgctacccctttgatggttaacgctgatacagattcttcaactcagagcaacaatcaagttccacaaattgttattgaaaatgtagataattcactcgtctccactgttgacgtgcttgacagctcagaaagtgctgtctttgatccaacaattttacccgtatctggtgctgttcaaacaataaaagataaaaatggcgcagtttcaaacatttcactgacaccactttttaatcctcgaactcgtgtgagtaacggttcttacaccataaatgcttggggaattgggtggaatgttacttattatatcaatatcagtagcaataaaattacttcagcaaataatttagattatattattgcaatgccagttaattctgccacggtaacagttgattcaagtaagcaagcaacagctcgtttttcatttagtacgcctatttataatattctatcttggactggttgggttagagcgacaatcaactcgtcaaataatattgtcatcacaacaaattaa

SEQ ID NO: 3096 - DNA, 1233 bp, Artificial Sequence
  Optimized genes for Lactococcus lactis
atgccaaatggtttgactgtttattatcttcccaaggcagattataatcggacttatggacttttcacaacaaattttgggtctcttgatacttcttttgtaccgttgggcgaatctgaattccaaacatttcctgaaggaattgctcattttttggagcataaactttttgaaaaagaagaaggcgatgttatgtataaatttggtgcactaggagctcaaacgaatgcttttaccagtttttctcgcaccagctatctcttcagtacacgtgaaaacagctacgaatgtactgaactcctcctggatttcgttcaaaaaccttattttactaaagaaaatgttgaaaaagaacaaggaatcattcaacaagaaattcaaatgtatcaagatgacagtgattggagattatttgctggtctattagaaaaaatgtacccagattcaccacttgctgctgatatcgctggaacaccagcaacaatcaacgcgattactgctgatgatttatacaagaattatgaagttttttatcatccaaaaaatatgaatttatttttaactggtccatttgatattgaaatgatgtcagactttgttcgttcaaaccaggctaaaaaagattttgcggatctctccgagatccaaagaaaagaaatcaaagcaagtgaacctatttctggagaaagtttggaacttgaagtggcaatgcctaaatttgcattaggattacgtggtgaagatcaactttcttcggactctaaaacactttttaaatataaattggctaatcaattattccttgacttgctatttggacgaacgagtcaacgttatgaagagctttataactcagggttgattgatgatagcttcggtttctcatttgatttggataaacgtttccactttgccgtcttgacagctgacacagaaaatccacaaattttaggtcaaactttacaagaagcaattaaatcatacaaaattgaccgtgatttttcagaagaacatttagatttattaaaaagagaaatgcttggtgattactttagttcattgaattcacttgaatatattgcaaatcaattttcatcagaaatttatggtgaccttactttttttgacttcccagaaatactgaaggaattaagtttatctgagatagagaagttcgccgatcagtttatttcagagatgaaaaaagtagaatttacaattcttcctaaataa

SEQ ID NO: 3097 - DNA, 282 bp, Artificial Sequence
  Optimized genes for Lactococcus lactis
atggaactcaagaacttgaaagatttttatgaaaaacaagaatatgttgattataatgagtcaaaaaattttgaacaacgtcaagttaataaaagaattgaagaacttagtttctttacaaatattgcagttttttctatttttttagtattcacaacttatattttagtctcacttttggcctcttggattgctattccagtgtcaattgttctaagccttgctttatacatcagtgttaaaaaaggtatcgctaaagcaataaaatttatgatgaaataa

SEQ ID NO: 3098 - DNA, 594 bp, Artificial Sequence
  Optimized genes for Lactococcus lactis
atggttgaacgtcgtgtagtattcccagttattggtgatgatgaagcacttcaaaaagatacccgggtgatctttacaaatcaacaacttttgacacgtaatccttcattacaagatgaagcttcaattgaaaataataaacctaaaactgacgctaaacgtccagaaagttttaaaccatacaaagcaaaaacatcattttctacgcagcaccgtcctttaaattcaaatcatgatggtgttagctcttatgataaaatgccaaaaaaaacaagtgttgacgaatcaaaagagcgagcgaaaagagctgctgcaactttgcctaagccgcctaaacaatatgtttctcccttagaacgcgacaaagaagatattactgttagacgctcaacatccgcgatcctcaacaaacgaccaagtgctaatgataatccaattcgtgatatgaaaaaccaaggaatgaatgtatctgatgcagtcgctaagggcgggatgaagaaagctgtcccacatggtgccgccgcaaatgacactcaaaaaggaagttattttgaaaacaaacgtaaaaatatttttgatagaggaattgtttaa

SEQ ID NO: 3099 - DNA, 4353 bp, Artificial Sequence
  Optimized genes for Lactococcus lactis
atgattaagaaatggactgtttgtctttcaattattattttagttttgaatttcgtacctaatcttttacaaggtcatcaagtctttgctgaaaatcaaaagaattataaggataaagttgaacttataaatgatgaatcatttaatattagctattctatgcaagccctagaaaaccagtatgaatgggaaattgattacagaattaataaaactgaaaatgacaaagaattaaagcttaaattttcatttgaaggaaatcaaccaattgaaattgaagaaaatgaaagctggaccctaaaagaaaaaaatactattatttcagactttgaaaaagaaaacgaaggtaaaattgtcttacgagctaacaattctatttctttgttgaatctggaaattcaagcagatgcgaagttaatcgaaaatgaccaagaagtcatcagtgaagacattctcgccaaaaaggaatctacaattttctcactttatattcctgagaataacaaagccgacagtaaagaaaaagataacaaaaatacagaagaagttcttaataatgaatcttcgcaagaagaaactgtttctcagctcaaaaaagattcacagttggcttttagttatccatctaactttggtataaaagcttctttcaatgatttggcccaaaattatgaaaatatatcaccagaatatcgtcaagacgaaacaggaattagtccgaatcattcatggataccaacagggaacacaactgtggttaaccatcaaggttggaatagtttcagtagccaatgggatggagtaaactcttggaacggtgaagctacaaatttagaaaatagttacattgaatacgctggtgtaaataatcctgtcgattttgctctgcgcaaatatgctaaagaaacagaaactccaggcttatatgatgtttatttgaacgttcgtggtaatgttcaaaacccaatcaagccagttgatatagtacttgttatcgatatgtcaggttcaatgcaaggggcgaaagaaactgcggttcgacagggggtttctgacttcctctcaactatccaaaatacagcatatgccgattatgttaatgttggtattgtaggttattcatctcctggtaactacgttacaggtgcatcaggatatattacagtaccaattgacaaagtgtcttctgaaagtcatgttaagagtattaatcaagcacttgctccacaattctctggtggaacttttacacaattaggacttcgtaaaggaacagaaatgcttgagcaagattcaagtgacaatcaaaaaatgatgattttgatgactgacggagtgccgacattttcatacaaagttaattcagcatctaaagtagataatgttatttatggtcaaagttttgctgaaagtcgtgacgaaccaggtaatacctcaaaaattcaatcaccttattatgttaaagatatcaacggtggttcaaacattgaaattcgtgatacttgggcagcaactttgggtgaagcagaaatcagtaagcaagaaatttctgaaatccatacactcgggattcaacttggaaatgatggttcttatcttagtcaagaagaagtaaaatcaagaacatcgttgattgcaacaacaggtttatatcaggatgcaaacagcgcaaatgatattaccgactacttgaaaaatcaagctaatgtagtcttgtcacgttttaatacaatcacaaatggactaattttagacccactcggtgctcaatttgaatataaagataccaaattcgaaattacttcagttggggaggactcaatcgacaaccttcccacaggcaaaatcaatgaaaaaggtttggaaattagtaatctaaatattggtaaaaatcaggaagtgcaaattcattatcaagtacggctcaatactgaaacagatgattttaaaaccaactattggtaccaaatgaatggagaaacgactttaacgcctaatggcagcaatccagataataaggtcaattttggagttccaagtgcaaaaagttctggtatcaatttaactttggaaaaacaatggttagctaattcagagaatattcctgaaaatgtcgaactcctaatcggaagacgctcagctcaaatctcgtcagattggacaaaaacggtgactttaaaagaagacgatgaatggcgttcacaacttgaaaatttaccaaaatatagtatcttgggagaagagtttatttacgaaattaaagacgagattgtgcttaattctgaaatctatgactggattacgattggcgaagataaaactactatagcaaatatcgaaaaatttcgtttgcaacttattaaaacatctaatcatgataatgaacctttatcagaagtagaatttgttttaaaaaactcacaaggagaagaaattgataaagcagttactaatgaaaaaggggaaatcttatttgataagactcgtttaaattatggagaagaatatcaactacacgaaatcaaatcccctggacatagtttggaaggaccttggaaaatcaaaaccgaatttgaaaacggacaacccatcattaaagtcgacggtgaacaaattgcccttgatgaacactataataaatttatgatttctctgaacatcactaatgatattaatgttgaagaatttagaaattcagtaacaattgacaaacgggctgtggattccgaggaaaaacttgatggagctgttttcaacctctatcaaattgagtctgttgatgatgaacttactcaattgaaaccattagagataacaaataacttgcttccaggattatacgcgcttcaagaaagcgtatcacccaatggttactatcgagatgatgaagttcattttttccgtgtaaagtttaatggtagcattgttgcaattggttcagaaggcatagatattccatttttagatgaaaatgaatctggaaaaaatgggttagtattaaacgaagaagaaaatggtgatttacaccttacattgattttttataaccaagcggtgccaccacttcagcttgaagttgacaagattgatgatgactttacgagccctttggcaggagtctcattcgagttgactcgccttggtcgtaagtccactgattctgatagtgttaaacgaattaattcctttgatcgtattttaaaaacttttaataatgaattcactggtgaaacaattgctttaaagtcaaatttggatggcaaattaacagtgattgataatgagaacaatggtcaggaatcaactagtcctatctctcttgaatacgatacacaatataaattggttaaaaaatcatcaattgggctttttccaaattttggcgaaaccagtcaatggattatcacgacaccaaatatggacgaattgaaagagcatgaagaagataataatattgaaattgatggtggcgatttactggaaactcctgatgaatccattcttgaatcgattaaccaaacaccttcaacattaggtgttgtttcactcataaaaactaaaaatcctgaatttaaagctttggagtcaacagattctcaagttgaaaaagtaaaatcagatagctcgttccaagaaaaaataagcgaatatctaatcagttttgagattcactcaaatattactcactcttttactattaaaaaagttgatggtgaatcaaatcgtccaatggatactcaatttgcattgagatgggttgagaaatttgagccgacgcaagattttgacagcttagaacgtttaaatctggatacacttgacctttctgggaacgacatcagcacaagttcaaaaacatcaattgatgctaaagctggagcaaccctatcgacagagaaaggttctaggacccttgaacatatggcacgcggaaatctttatatcatctcagaagaagaagttcctactggttatcaaaaaacaaacactgtcattgttgcttatatggataaagcacaaggctatgctgataaagcgacaattcatattagattagcaaaaagaagtgctactcatccagaaatactggagttcggaagtcttgaagatttcaaagagtataaaggagatctcgaagatgaaattggaattgtttttgccaattacaaaattgctgagggcggatctgaggagaaagaaaaagaaaaagaagaaaataatgaaatgcgtaataaacaagagaccaataaacctaacattgaattgccagctcttggggctattggtgttggaggagtcggcttgttattaattatatctgcttatttacttaaaaaataccgtggaaaataa

SEQ ID NO: 3100 - DNA, 780 bp, Artificial Sequence
  Optimized genes for Lactococcus lactis
atgagtgaaattattaatcatattacagccttccaacctgtttaccgagtccttaaccgcgaagaaaatcttgatttttatcgtgaagttttaggattcaaagtattggtggaggagggcgcaatggtttggcttggcggacatgaagctaaaaaagaccgttttcaattggaagaaagccctgggtttagacccgtagaaggattaaagaaacatggtcaaacagttattaaagctaactcaagcgagatcgaacaacttattgttcgtaatttggataaaatttcaaaagtttataaaggtaaaaatggttttgcttttagtgccttatctccagaagcagaactcttccttgtcacgtctgatttactcaccgacctatcgtctttgactgaaattgataaatctgaaatcgaattagaagaagacaaaacatttaaaggactgagtgactttgaaataatcgcgatggatcttaatgttgctgatcagtcaattattgaattctatgaaagtgtctttggtttgaaagcaatcaataatcaaattgaatttccatttgtaactttgacattctcagttgaagaatcagaagatttggctgctggtacagatgaagtgttagaccttgaatttttagtttttatgattgacaaggattttgatttaaaagatttcgcacaccaattttcagatgttgatggaacttatttagatggttcagcaaaaactttttctctagaggtaccagatcatgttgaactttggtttgttaaataa

SEQ ID NO: 3101 - DNA, 843 bp, Artificial Sequence
  Optimized genes for Lactococcus lactis
atgaaaaaaattaaattactgactttggcgaccgtcggaattgcttctattggtttattggcagcttgttcctctaaagacaacagttcaagtaaatcaactgataaagtaaccactgttacagttgctacttcagcggcaagtgttccatatgaatactcggaaaatggaaaaatgactggttttgaatatgatattttgaaagcagcagataaagatatgaaagattataaatttgatttcaaagtttacgaagattcagccattttagctgctcttgacggaggaagagctcaaattgccgcaaataattttggtaaaacaaaagctcgctcagaaaaatacctcttctcttatcctgtccgtcaaggaatcgatgcaattttttcaacaagtaaggagaatattactaaaatatcacaacttgcggggaagacaacagaaattcctgctggtacaaattatggtgatatgtttgagtcttggaataaaaatcatcctgataagaaaattaatgtgaaatattctcagcgtccactcgctgaccgtttgtcagcaatctcttcaggtcaaattgattttttatttgcttcaaaagccccggctgaaaacctaatcaaagaacatgcaataacgggcttagttgatacagtaccaacagatttggacaaacaaccagaatttaaaacttatgactattttatccttgataacagtcaaagcaagcttcaaaaagatttaaatgttgaacttaaaaaactttatgataatggtactttaaaaaagctaagtgaacaatatttccatgatagccacattccagctgcagaccaatttaaataa

SEQ ID NO: 3102 - DNA, 495 bp, Artificial Sequence
  Optimized genes for Lactococcus lactis
atgaatgaaattacttatactcaaatcatgccaaatgatattgatgacgtaatccgtattgaacgcgccacgttttcagaaaatgaagcgctaagtgttgaatcaatgattgagcgaatcaatcttattcctgacagctttattgctgctagaaacagtgagggcaccgtcgtgggttatgtttcaggaccagtaacagaaggtcgttatcttgatgatgaaagttttgaacgtactgaagcaaatccaaaaacaggtggattccaaaaaattatttctttgacagttgatccagattatcaaggactcggaattgcaacaaatttactgttgcttttagaaaaagaagctaagtcaaaaaaacgtttggggatatcgttaacttgtcatgattacttagttccttattatgaaaaacacggtttcacaaacgaaggactttctgaatctaaatttggtggtgaaacttggtacaatatggttatggaattttaa

SEQ ID NO: 3103 - DNA, 1086 bp, Artificial Sequence
  Optimized genes for Lactococcus lactis
atgcgtcgctggattattcacttggttatgactgttattggcgcttcacttggagtcgcggtagttccttcaattttaaaagtatttggttgggatactggtatattacaaaatgaagctgtcgatgcagtcattggtgcaattatctttatcatcctcagtttcatttttgcaggttcaatgcttaatggtctaaaaaaaatcgacagccgtatttctaaaatgaatatgtcaaaaatggtttttaatattattggaattgtcttgggtttacttgtcggcgtgattgggtcgattcctctccgttttttaaacgtaccaattttatcaaacatcatatcctttattctcgtcctagtcatgatttatttaggttatgttttatttgaccgtcgtggagatgaaattgctcgtgttctttttagaaaaagacgtgaagcaatggcaacagaaccagctgaagttgcagaagaagtggttggtgaatctaagagtgataattctatattactggacacaagtagtataattgatggccggatcttggacgttattaaaaccggattcatctctgacaaaattattgttccaaattttgttatccttgaacttcaattgatttcagattcttctgatccacttaagagagcgaaaggaagacgaggacttgatttagttaacgaattaacaaaatttgatcaggttgaaattagtcaagttgattttgctgatgttcgcgaggttgacacgaagttgttgaaatatgcatcatcaactgggagcaaattagtaacaaatgatttcaacttgaataaagtggccgagattcaaggagtacaagtattaaatatcaatgatttggcaaatgctgttaaaactcaacttgttgttggagaacatattaatgttcaaattatccgagctggatctgaacgtcaacaaggtgttgcttaccttcctgatggtacaatgatagtaattgaagatacagctaaacttattgataaaacagttactgtagaagtagccaaagttttgcaaacttcagctggtcgtatgattttcgccgatctggtgaaaaaataa

SEQ ID NO: 3104 - DNA, 210 bp, Artificial Sequence
  Optimized genes for Lactococcus lactis
atgaaatataaattaaatccactttttaccttgagaaaaacagataaagcagtattcaacttttctcgtgctgaattgacacaatttaatgatactggttttgatattttacttgctgttcttgaacaagaatcagaccgtgaatggactgatgatgaagacgaatttttaaaggagctcatcaaagaaaaaattgttgaagaaagttaa

SEQ ID NO: 3105 - DNA, 474 bp, Artificial Sequence
  Optimized genes for Lactococcus lactis
atgaataaaaaatcaagtgcgctcttgacaatgggaactttgacgctgcttgctgatggtggggtagttttaacaaatttacctgactcatttaaaattcaacgtgtctatgcagcaacaagccgtgatattactgtttattcaaaagattttttgacttacttccaaagaaatggttcagctgctggctttgattatgatttagccacttatacacaaacacttacaccagaccttggaaatcaagctggtaatgttaccttgaaaacaaaagttgatatgagtcaaaattttacttttacaggtcaaattaatcttggcaacaagtctcagcaaaacgggggagctgacggtgttggttttttattccacccaggagatacttctgttgttggagcacctggtggtgctgcaggacttgtggtcttgatggaacatttagtactatcttggattttaactatcatggaataa

SEQ ID NO: 3106 - DNA, 309 bp, Artificial Sequence
  Optimized genes for Lactococcus lactis
atggctttctcaaatactcgtcgtcgctacgcatcatttgacacagtcgcctcaattcctggtgaagttattgatgctttttggtttattatcgaccatcatttgaaaggggtttttccacttgaaacaattattaattttgatttagtgaacagcggaaatttactttctattcgtttcagtcaagataactctccaacaaccatattggtagattttggttatccatttaatcctgaatggccactccactatcgagcagttgataatatgggaagagagactatcatgactgctcgtgaaatgtaa

SEQ ID NO: 3107 - DNA, 441 bp, Artificial Sequence
  Optimized genes for Lactococcus lactis
atgaatcatattcctgtctttggtgaaaaaaatgaagaaaaaaattatcaagcaagatatggtgtttattctattgttgctcgtgaaaataaagaaatttgtttagttcaagcgccaaatggtgcttacttcttgccgggaggagagattgaagcaggagaagaccaagaaaaggccctccaccgagagttgatggaagaacttggcgcaacagctgaaataggggaattccttggtcaagctgatgaatatttttattcaagtcatcgtgataaatattactacaacccagcttatatttataatacaaaaaacgtgcgctttgattcaaaacctttagaagattttaatcatatctcttggtttgacccagaaactgcaatcagcaagcttaaacgtggttcacataaatggggagtacaagaatggttaaaaaaataa

SEQ ID NO: 3108 - DNA, 1320 bp, Artificial Sequence
  Optimized genes for Lactococcus lactis
atgccagtgtctcgaatcaaagtgaagaaccgccatcttaagaagaaagcaaagaaacctctggccttttataaacccgctactaaattcgcgggtgcggtgttaattgccggtacgctcactacaactcacgaactcctgttgcagcagacaagtccaatggtccaagcagccaccaattcaacagaggcgttcatagagtccatcgcggcgtcagcgaagccagtagctgacagtaacggtctttatccctcggtaatgatagcacaggcaatcttggagtccaattggggatcctcgcagctaagtcgagctccgtactacaacctttttggaattcaggggacctatcagggcaagtcggttgtatttaaaacgcaagagtacctgaatggaaagtgggtgacaaaagatatgccttttcgcgtatacccatctttcaatcaaagcttccaggataacgcctatgtactaaaaacgactaacttcggcaatgggccctattatgcaaaagcatggcgtgcaaacgcagccacttatcaggccgcgaccgcggcgctgacgggtaagtacgcaaccgaccctaactacggagcatcccttaaccgtatcatctcgcagtataaccttacacgctttgacggagcatcttctgcagggacgagtaattcgggtggtagtacagctaccaacactaataacaattctaacacaagctccacaacatacactgttaagagcggggatactctatgggggatatctcagaaatacggcatctccgttgcgcaaatacaatctgccaacaaccttaagtccactgttatttacatcggtcagaagctagtactgacgaccagttcaagcagctcgaataccaatagttccacctcttctggaaattcggcggggacaacaactccgactacttctgtgactcccgcaaagccggcgagtcaaactactataaaggtgaaatccggtgatacgttatggggattgagcgtaaaatacaagacgactatagctcagttaaagagctggaaccacctcaactcggataccatttttataggccagaatttgattgtcagccagtcagctggatcctcatcatcctcaaccggctcatcctccgcaagcactagcagtacttccaactcatccgcagcgagcaacacgtcaatacataaagtcgtcaaaggtgatactctgtggggactgtcccaaaagtcggggtcgccgatcgccagtattaaggcttggaaccatttaagctctgatactatactcataggacaatacctgagaataaagtag

SEQ ID NO: 3109 - DNA, 1428 bp, Artificial Sequence
  Optimized genes for Lactococcus lactis
atgacgactttcggggttgcaggacatgctgacggggttacagtcggttcctcctctgacgcttcttcatccacgggcagctcgtcatcttcaagtggtactggtgggtccagctctagcagtagcaccggatcaagttcctcgagctccaacagtaatgcctcttcctcgtcatcatctacagggaacagttcttcatcctccaaaccaagtacctcaggaagcacctccaaaccctctaatccaagctcttccacgaataacaactcgacctccaattcatccacgactactcaggcgccgtctacctcggtgtccacgattgccccgagtgcctcaactagtacagttgcacctagcaactactcacaggacaatgcatattaccagactagtactgcagcacagatccctaacagttctgcagattccgcgccatcaatttacgcgggacctgtactgaaaaccatagaagccgccaaaagtattgataaaattgatacgtcctctactgaagcgtttatcaagtctatcgccgaccgcgtgcgtatcctagcaggtaagaacaacttatatgcctcaataatcctggcacaggcgatcctcgaatctggaagtgggcagtctaatatgagtcagcaatatttcaatatattcaatataacgggtgcgtatctagggaaatccatatcctttaagacagaggagtttagtggtaataatccgtactatattgagcaaagttttcgggtctatagtaactacgaccaagcacttgacgactatattaatctgatgataaagggcacaacctggaactctgaaatctatgcaggggcgtggaagtcacatgcgaagacataccaggaagcagctcaggcgctacagggtattttcgctacagatccggcttatgcgcagaagttaatcgagataatacaagagtacaagttggatgcgtatgacaatgtggactcaacgacccaggttgtggattcaaagatcccagaatcgccattagccgccagcaagctggacaactcggcttatcctgagtataatggggttgagtaccccggcgcagactcttatgcatttggtaactgcacccagtacgtatataacagaatcatacaacttgggggtctcgtaggtacccacatgggaaatggcggcgaatgggggattaatgcgcaggcacagggttatttcacaacgactgtgcccaccgaaggatacgctgtttcatttcctccaggagtggctggctcttctagcgaatacgggcacgtcgccttcgtcgaaaaagtatattccgataattctatattggtctcggaaatgaacgttaaaggcaacaatatagtttcagaacgacacatatccgcgggagtcgctgcactggccacatatattcaaccgaagtaa

SEQ ID NO: 3110 - DNA, 1086 bp, Artificial Sequence
  Optimized genes for Lactococcus lactis
atgaagcagaagcacaaactcgcattaggcgcgtcaatcgtcgctctggcgtcccttggcggaataaaggcacaagccgcatcggttcaggaaatcataaatgcagctgtcccggttgcaaacgattatggcctgtatcccagtgttatgatcgcacaggggatcctggagagctccggcgggcagtctgctttagcttccaactacaataacatttttggcgtcaaatacacatcggggacgccagtatatctccctacacaagagtatttaaatgggaccatgacgaacgtcgttgagccgtttcaagcttattcttcggtttatgacgcatgcgtagcgcaagctaagatgcttagggcttcctcatattattcgggtgcatggcgagagaacacatcgagctatctagacgcgaccgcgtggcttgaagggcgctatgcaaccgaccctacgtacgcctccaagctgaatagtgtgattagtgaactggggctctcagtctatgatcaaggtggcgaaatttcgggcggaacggcggttacaacatcgtcgtctgcgtccacaaactccgcgggaacctacaaggtgcaagagggggactcgctaagcgcgatagcagcgcagtacggaaccaccgtcgacgcacttgtttccgcgaactcattagaaaacgctaatgacatacatgtaggggaagtgttacaagtcgcgggggcttcgaccactacaacgtcaacaaataccacctccaacgtaagcagctcatctacatacacggtaaagtctggcgatagtctctatagcatagctgaacaatacggcatgacagttagctcgttaatgtcggcaaatggtatctacgacgtaaactcaatgctgcaagtcggccaagttctgcaagtcacagtttcaacatcggcaacaacatcgaataccacaacttctaactcatacacgatacaaaacggcgacagtatatattcgatagcaacggctaatggtatgactgcagaccagctcgctgcactgaacggattcggtattaatgacatgatccacccaggtcaaaccatccgaatttaa

SEQ ID NO: 3111 - DNA, 222 bp, Artificial Sequence
  Optimized genes for Lactococcus lactis
atggcagtttttgagaaagtgcaggatattattgtcgatgaattaggcaaagagaaagaggaggtaactctggaaacttcttttgaagagctagacgcggatagcttggacctttttcagatcataaacgacatagaagatgaattcgatgttgaggtcgacaccgaggccgacatgaagaccgtcgcagacctcgtcaaatacgtggaaaacaataagtaa

SEQ ID NO: 3112 - DNA, 2712 bp, Artificial Sequence
  Optimized genes for Lactococcus lactis
atggcaacgaagaaggcggcgccagcggcaaaaaaggttctcagcgccgaagagaaggctgcaaaatttcaagaagcagttgcttatacggacaaactcgttaagaaagcccaagccgcggttctaaagttcgaggggtacactcaaacccaggtagacacgattgtggcggccatggcactcgccgcctcgaaacattccctagaactagctcacgaagctgttaacgaaacgggacgtggggttgtagaggacaaagataccaaaaatcatttcgcatcagaatcagtctataatgcgatcaagaacgacaagacagtaggtgtgatatcggaaaataaggtggccggttcggttgaaattgcttcaccgctaggtgtactcgctggaatagtccctaccaccaatccaacgtccaccgcgatcttcaagtccttactcaccgctaaaacccgaaacgcaatcgtatttgcgttccacccacaagcgcagaaattctcgtcacatgccgctaaaatagtatatgacgcagccattgaagcaggagcaccagaggacttcatccagtggatcgaagtcccctcgctcgatatgacaactgctctgattcaaaatcgcggtttggctaccatcttggccactggaggtcctggaatggtgaatgccgcactcaaatccggaaacccaagcctcggcgtcggagcagggaacggtgcggtgtatgttgatgctacagctaatatagaacgggcggtggaggacctactccttagcaaaagatttgataacggtatgatatgcgccactgagaatagcgctgtcattgacgcgtcagtgtacgatgagtttatcgccaagatgcaagaacaaggagcatacatggtacctaaaaaagactacaaagctattgagtctttcgtttttgtggaacgggccggtgaaggtttcggggtaacgggaccagtagctggccgttcaggacagtggattgcggagcaagcgggagtaaaggtacccaaagacaaggacgtcctattattcgagctagacaagaaaaacatcggcgaggcattatcgagcgaaaaactctctccactcctctctatctataaagctgaaaccagagaagaaggtatagagatcgtacggagtctactagcctaccaaggagctggacacaatgctgccattcaaatcggggccatggacgacccgtttgtcaaggagtatggcgaaaaggtggaagctagtcgaattctggttaatcagccagattctattggtggggtgggtgatatttatactgacgcaatgcgtcccagcctcacactgggaactggatcatggggaaagaatagcctttcgcataatttgtctacgtacgatttgctcaacgttaaaaccgtagccaaacgtcgaaacaggccccagtgggttcgactacccaaggaaatatattacgaaaaaaacgctataagctacttgcaggaactgccgcacgttcataaggcattcattgtagctgacccaggaatggtcaagtttggattcgttgacaaggttctcgaacaattggctattagacctactcaagtcgaaacaagcatctacgggagcgttcagcctgacccgacgttaagtgaagccatagcaatagcccgccaaatgaaacagtttgaaccagacactgttatctgcttagggggaggatcagctctggatgcgggcaagataggtcgactaatctacgagtacgatgcccggggggaggctgatctatcggatgacgcctctttgaaagagttatttcaggaactggcacaaaaatttgtcgatattaggaaaaggatcattaaattttaccacccccacaaagcgcagatggtcgccattcccactacgtccggcacgggttctgaggtcaccccatttgctgttattaccgacgatgagactcatgtaaagtaccccctcgccgattaccagctaacgccgcaagtagccattgttgatccagagttcgttatgacagtgccaaagagaactgtcagctggtcaggtattgatgctatgagccacgcgctagagtcctacgtctccgtcatgtcaagtgactacacgaagcccattagcttacaggctataaaactcatctttgaaaatctgaccgagagttatcactatgatccggctcatcctacgaaggagggtcaaaaagccagggagaatatgcataacgcagcaactctggcgggtatggcattcgcaaacgcatttctaggcatcaaccactcattagcgcataaaatagggggtgaattcggtcttcctcacggattagccatagcgattgctatgcctcacgtgattaaatttaatgctgtcactggaaatgtcaaacgtactccttatccgaggtacgaaacttatcgggctcaagaagattatgcggaaatttcacgatttatggggtttgccgggaaggacgattcggacgagaaggcagtgcaagcactggtagcggaactcaaaaaattgacagactcaattgacattaatatcactctctccggaaatggcgtagataaggctcatcttgagcgtgaactagacaagcttgcggatctggtgtatgacgatcagtgtacaccggccaaccccagacagccgcggatcgacgagatcaagcagttgttactcgaccaatactga

SEQ ID NO: 3113 - DNA, 564 bp, Artificial Sequence
  Optimized genes for Lactococcus lactis
atgtctctagtcggtaaaaagatagaagaattcagcactgatgcgtaccttggaggcaaatttattaaagtctctgacaaggacttctatggaaagtggtcagttctgtgcttttatccagccgatttctcgttcgtgtgcccaacggagcttgaagatttagaggagacgtatcccacactaaagtcacttggtgttgaggtatactccgcatctacagacacacattttgtgcatgccgcgtggcatgagcattcggacgcaatctcaaaaattacctaccccatgttagcggatccctctcaaaagattagtcgggcatttgatgttttagatgaggaagcaggtctggcacagaggggaacattcataatcgacccggatggcgtcattcaggctcttgagattacagcagacggcataggacgggacgctagccagcttgttgataaaattaaagcagcccagtatgtacgtaatcatcctggcgaagtctgtccggcgaaatggaaagaagacggagcttcactgcatgtcggcattgacctggtgggcaaaatatga

SEQ ID NO: 3114 - DNA, 711 bp, Artificial Sequence
  Optimized genes for Lactococcus lactis
atgaccgagataacgcagttatttcaatataacacgttaggtgctttaatggcaggcctatacgaaggtactatgacgatcggagagctgcttaaacacggagacctgggtattggtactttagatagtgtcgatggtgaattaattgtccttgatggaaaggcatatcaggccaagggcgacaagacaattgtcgagctaaccgatgacatcaaggtaccgtatgccgcagttgtaccgcatcaggccgaggttgtattcaaacaaaaattcactgctagcgacaaggagctagaggatagaatcgaatcttatttcgacggtcagaacttgtttcggagtattaagataaccggagaattccctaagatgcatgttagaatgatacctagagcaaaatcagggacacggtttgttgaggttagtcagaaccaaccggaatacaccgaagagaatgtgaaggggaccattgtgggaatatggactcctgagatgtttcacggtgtgtcagtagcagggtaccatttacatttcattagtgaagactttacttttggaggacacgtgctcgacttcatcatcgacaatggcacggtagagataggcgctattgatcaactgaatcagtctttccccgtgcaagatcgaaaattcttgttcgccgatcttgatatcgaagcgctgaagaaagatatcgatgttgccgaataa

SEQ ID NO: 3115 - DNA, 1665 bp, Artificial Sequence
  Optimized genes for Lactococcus lactis
atgtctgagaagcaattcggtgcgaatcttgtagtcgactccctcattaatcataaagtaaagtacgtgtttgggattccaggcgcgaagatcgatcgggtctttgacttgctagagaacgaggaaggtccccagatggtagtaacgcgtcacgaacaaggggccgcatttatggctcaagcagtcggtcgtcttactggtgaaccaggcgttgtcgtagtcacgagcggaccgggggtgagcaatctagccactcctttattgacagcgaccagtgaaggagatgccatcctggctatcggcggtcaagtaaaacgcagtgatcggctgaagcgagctcatcaaagtatggataacgcaggaatgatgcaaagtgctacgaagtacagtgctgaggtattggatcctaatacgctatccgaatccatcgcaaatgcttaccgaatcgcgaaatctggtcatccaggagcaacctttctcagtattcctcaggacgttacagacgcagaggtgtcgatcaaggccatccaacctctcagcgaccccaaaatggggaatgcctccattgatgacataaactacctagcccaagccattaaaaatgcggttcttcctgtgatcctcgtaggcgcaggagcgtccgatgcaaaagtagcctcatccttgcgtaatcttctgacacatgttaacattccagttgtagaaaccttccagggcgcaggcgtcatttctcacgacctggaacatacgttctatggacgcatcggcctctttcgcaaccaacccggggacatgctgctaaagcgaagtgatctcgtgattgcagtggggtatgaccctatagaatacgaagcgcggaattggaacgctgaaattgatagcaggataattgtgatcgacaatgcaattgccgagattgatacttattatcagccagagcgcgagctgatcggcgacatcgcagcgacgcttgataacctactccctgccgttagagggtataagattcccaagggaaccaaagattacctcgacggtctccatgaggtagcagagcagcatgagttcgatacggaaaatacagaagaaggcaggatgcatccgctggatttagtaagcactttccaggaaatcgtgaaggatgatgagacggtgacggtggatgttggatcactttacatatggatggctagacattttaagtcgtatgagcctcggcacctactattctccaatggaatgcaaactctgggagtagcacttccttgggctataaccgcagctttgttaaggcccggcaaaaaagtatactcacactctggggatggcggcttcttgtttacaggacaggagttggaaacggcggttcgtttgaacctcccaatagtgcaaatcatttggaatgatggccattatgacatggttaaatttcaagaggaaatgaaatatggacgaagtgcggcggtagatttcggctatgtagactatgttaaatatgcagaggcaatgcgtgctaagggttatagggcccattccaaagaagagctagccgaaatcttgaagagtatcccggatacaaccgggccggtggtaattgatgtgccacttgattattctgataacattaaattagccgagaaactgttgcctgaggaattttactaa

SEQ ID NO: 3116 - DNA, 1476 bp, Artificial Sequence
  Optimized genes for Lactococcus lactis
atgaagacaatactccaggcgtttgagtggtacctcccatccgactcccaacattggaacaatattaaggagaacattcccgacctaggaaaattaggcttttccgggctctggttgcctcctgcaagtaaagcagcgtccggggttgaagacgttgggtacggtacatacgatttgttcgatttaggcgaattcgaccaaaaaggaacaattcctacaaaatacggcaccaaggatgagtacctagacctgatcaacactctgcatcacaataacatcgaggtgtatgctgatatagttttcaaccatatgatgggggccgacgagacagaaaccatagaagccgatataaaggcagaggacaaccatctacacaacatcgaaaacaataagacggttgaagtgtggactaagttcacttttccaggacggcagggtaagtacgacaattacatatggacatggcataacttcacaggtatcgactatgatgagagaaagaatcaagaggaaatactcgagttcgagggacacgagtgggacgaaaatgtggattcggaaaacaataattttgactacctaatgggggcggatttagacttcagtgtcagcgaaacggtggaacagctcgagaagtggggccattggttttcggagatgactaaaatagatggctttcgtctggacgctatcaagcatatcgacttcaaatacttcgataagtggctagagcaacgggcaaagcaactcgaccggaagctttttatagtaggagaatattggagcgacgatctcggaaagcttgagtactatctcgagcaaagctccgacaggatacagctgttcgatgtccccctccattttaacatgaaggaagcgtcctccaccaacggggaatttgatatgcgtactctgtttgaccacacgctaacagcctcccaaccagaattgtcggtcaccttcgtagataaccacgatacgcaagaaggtcaagccttacagtcgtggataccggcctggttcaaagaacacgcttactcactaatcctccttcgtaaaaaggagacccctaccgtattttggggtgatctttatggcatcccaagtcataacgtgaatcctgtcggtgataatcttaggaccatgatagcactgagaaaggactccgaattcctcagagaaaatgactattttgaccatccagacatcattggttggaccaacatccttaagatcgacaataaagagtacggactaagctgtatcctaacgaataaaaatggtggctctaagtacatgatcatagacaaagcctacgcgggtaaagtgtatatagacttatttggtcggcacgaaatcccaatcaccctagaccagaacggaggtgccgaattctacgtgaacgatgggtcggtctccgtttgggtagataaagagattgtgtcgaagatagatcaaatgaatttccaaaattaa

SEQ ID NO: 3117 - DNA, 645 bp, Artificial Sequence
  Optimized genes for Lactococcus lactis
atgcaggaaatcataatccaggtaatgaatcaatttggttactttggcgttgcgttcctgatcatgatcgagaatattttccccccaattccttcggaagttattttgacgtttggcggctttatgactacttactcagagctcggaatcatagggatgatcattgcggcgacgataggttccgtattgggcgccttgatactctatttcgtaggtaggctgctatcggtagagcgtctcgaaaaacttgtgtccgggcgcctaggcaaagtcctccgcttaaagcccgaggatattacaaaggcggaaaagtggttcctaaaaagaggatatgcgactatttttttttgtcggtttattcctttgattcggtctctaattagcatacctgccggcagcgcaaaaatgaagctaccttcctttctcattcttacaacgttaggtaccctaatctggaacatagtattggtctgtttgggtgccgctctaggagacaactgggagatgatagctggcattctagactcatactcgtcggtggtcgtagttatactgggtatcatttttattcttgccatcttaattttcgtaaagaagcgtttcttcccgaaaaataaaaactactcatccgacactgagaagtag

SEQ ID NO: 3118 - DNA, 1473 bp, Artificial Sequence
  Optimized genes for Lactococcus lactis
atggatgcggagaacaaaaaggggatcgggctcgccgctctcgttgctatcatcgtttccggagccatcggaggtggcgtattcaatctctccaatgatttggccaccaacgcgagccctggtggagttgtcatcagttggatcgttatcgggtttggtattctaatgctcgtattaagcctcaatcatcttgtcgttaacaaaccagagctatcaggggtctcagattatgctcgcgctggcttcggaaatatggtaggtttcattagcgggtgggggtattggctcagtgcctgggccggtaatattgcgtttgcagtcctaatgatgacatccgtcgactactttttcccaggagtatttcaggctaaaaatggaagcctaactatactttcggttatagtcgtgagtatcgtaagttgggggcttaccctattagtaatgagaggggtggagggagccgcagccataaatgctatagtcctggtagctaagttgataccattattcgtatttgttatagccgggatagtgacgttcaaagctggggtgtttagtgcgcacttttggcaaaattttgtcgcgaacacgaatgcagacggtgttattaaatcgctcacgtggagcaatatgactgggggggaccttttttcgcaggtaaaggggagtctcatggttatgatttgggtcttcgtagggattgagggtgctgccatgatgggagatcgcgcaaagagaaaatcagacgcgggcaaggctagtattcttgggctcattgcactacttgtaatttatatattgcttagcctactgccttttggattcatgtcgcagcaggagctggcaaacacgggtcagcccggattggtacacattttaaatgcaatggtaggaggctgggggggttccctaatggccatcggcttggtaattagtctgctgggggcctggctaagctggaccatgcttcctgtagaagcgacacaacagttgagtgaacagaagttgctgccatcctggtttggtaaattgaatgataagggggcaccaaaaaattctctcttactgacgcagcttatcgtccaaatctttctaattgtcacgtatttcgttgccgacgcttataacgtattcgtttatctatgcactgccgtaattatgatatgttacgcattagttgggttgtacttattcaaactgggtatacaagaaaagaagacgtctaacatcattataggttttatcgctgcagcgttccagatattggccctatattactccgggtggcagttcgtatggctctcgcttatcctttatgctgtcgggtttatcttgtacgctctaggaaagaaagagtatggtaccaaaatgagtacagcggagctcattgcaacctttgtgctaactgtgctgggaatcttggcggtattcggagtgtacggtaactggctggcacgttgcacatggaattag

SEQ ID NO: 3119 - DNA, 1131 bp, Artificial Sequence
  Optimized genes for Lactococcus lactis
atggaactagtgcaattcgggtgtgaggactggttaaacgtctgggagaaatccgctacaatcgatatagcgcaaagtactatcgattccttgtcattggaagaggtgctcgctttcgaagaggataacggagaggctttcatgagccagatgatgaaagaaaagttcagctatggttggattgaaggatcaccagccttcaaaagcgaagttgccaaactgtacaaacgtgttcctgaagacaatattctgtctacgaatggtgcgaccggtgccaatttcctgacgatacttggattgattggtcagggcgatcatgtaatcgcgcaatatccatcctaccagcagttatatgattggccgaaaacgctaggtgcacaggtagactactggcatattaaagaagaaaacaactggttgcctcagatagaggagctacgaaggttggtgaaatctaatacaaagttgatctgccttaataatgcagctcaaccgactggtgctatcatgtcaccgaaattcctcagtgaggtagtcgagatcgcgcggtcagtcgatgcgtatattttatgtgatgaggtgtacctacctctagacgaggaaaccccgtattcgcctatagcggacctctacgagaaaggtatatctactaattcaataagcaaaacctattcagtgccaggaatccgcgttggttgggttgcgacacaagatcgtgacttatgtaacgagtttcgtaaaataagagattacactctaatttgtacgggcgtgtttgatgatgcggttgctgcgctggtactaaagcataaagacaaagtgttggagcgagcaaggaaaattgtgaaaggaaaccttagtatattgaaagaatgggtggagaatgaacccctcgtttccatggtttatcccaacgccgtttcggtctcgttcgtcaagtttgaagagctcgatcctacaaaaactgaagactttgcaatccagttactgcgagaaaaaggggtcctgatcatccccggaaaccgtttcgaccttagcggttatgcacggataggatactgcacagacgaaactactcttcgtcaagggttgaagttactctccgagtttcttcgtgagtaccaagtctga

SEQ ID NO: 3120 - DNA, 1023 bp, Artificial Sequence
  Optimized genes for Lactococcus lactis
atgacgtttaaggaattaagcaataaaatcaatatcaaggacgttcgtgagcttaaccacctgaatgacgagcagcaagagaagaaggaaaaaagggataaggagcttgaagccataattaaaggagaggatgaccgaattcttctggtaatagggccttgttcgtccgacaatgaagccgcggtactagagtatgctcataggttattaaagctgcaaaaagaggttgaagataaaatattcattgtcatgcgtgtctacaccgcaaagccacgcacgaacggagatggctacaagggtctaattcatgagccagatgccgatggccacaccgatcttattaatggcataaagatggtcagggacctccattacaaagtaatcactgaaacgggtctaaccacggcggacgaaatgctatatccagaaaatctgcctttagtggatgacctcgtttcttactacgcggtgggagcgagatcggtggagaaccaacaacataggttcgttgccagcgggattgacgccccgaccggaatgaagaatccaacgagcggtaaccttaaagttatgttcaatggtatgtacgcagcacagcaatcccaagattttcttttcggaaacgcggaggtagagacctcaggtaaccctttggcgcatgctatacttcgaggcgggcaggacgagaatggtaaaaatcatcccaattattataccgacaacctgttggaatctattgaaatatacgaaaaaatgggccttcagaaccctttcattgttatagacacaaatcacgacaactccgggaaaaaatacatggagcaaattcgtatcgtacgtcagacactagttaaccggaactgggatgaacaaattcacaaatacgtccgaggcttcatgattgagtcctacttggaagatggccgccaggataagccggaagtctttggtaaaagtattacggacccttgtctgggttgggataaaacagaggaattgatcaacgaaatctacaactcgtaa

SEQ ID NO: 3121 - DNA, 564 bp, Artificial Sequence
  Optimized genes for Lactococcus lactis
atggaattcaggttggctaaaaaatcggatgcaaagcgcctacttgaaatatataaaccttacgtcgaaaagactgctataacgtttgaatacgaagtccccacaatagctgaatttgaaaaacgcattgaaaaaataggttcaagatatccttatattgtcgcgatagaaaatgataagattattggctatgcgtacgccggcgcctatcgggagagggcagcctatgattgggtcgtggaactgagtatttatctagatgaaaacgagaggcaacacggtgccggtagtgctttatatcaaaagttgttaacagcgctttcggtccttaattatcaacgtgcctatgcctgcatcacgtaccctaacccagcctctgttgcctttcacaaaaaattcggcttcgagcagataggactttttccaaaggccggttacaagtttgaacagtggtacggtattgtgtggcttgaaagaagcctacagaccactgacaaagtaaccgcgattaaacttctgacggacctttcagagaatgagttagagaagattcttgctaactga

SEQ ID NO: 3122 - DNA, 1023 bp, Artificial Sequence
  Optimized genes for Lactococcus lactis
atggcgatcaatctcgactgggaaaatttgggtttctcataccgcaatctcccttttcgttatatagcgaggtttaaggatgggaagtggtccgctggggagcttactggtgataaccaattgcacataagcgaatcgtcgccagcattgcactacgggcaacaaggtttcgaaggccttaaagcttatcgcacgaaagacggatccatccagctattccgtcccgaccagaacgcagcgcggttgcaaaatacagcccgccgtctatgcatggcagaggtaccgacagagatgttcatagacgcggttaaacaggtcgtcaaggcgaatgaagacttcgtacctccgtatgggaccggtgctaccctgtatctacggcccctcctaatcggggtgggcgacgtaataggcgtcaagcctgccgatgagtacattttcacagtattcgcgatgccagtcggttcgtactttaaaggcggtctggcaccatcgaagttcgtgattagtcgcgattatgaccgagcggcaccactaggaacgggcggcgcgaaagttggcgggaactacgcagctagcttacaagcggaagtaggtgcgaaagcgtcaggatacgccgacgccatttatctggatccatccacgcacacaaaaattgaagaggtgggtgcagctaacttctttggaatcacagctgacaatgaattcatcacgcctctttccccaagtattctgccgagcatcacgaagtatagtctcctatatctagctgagcatcgcctcgggctaaaagctatagagggggaagtttacgctaaggacctaggcaaattcgtagaagctggtgcatgtgggacggccgcgattatatcccccatagggagaatagatgatggagaggattcatacatctttcactcagaaactgaggtaggcccaactgtcaagcgcctttatgatgaattggtcggaattcaattcggcgacgtggaagcacccgagggttggatagtaaaagtagattga

SEQ ID NO: 3123 - DNA, 1053 bp, Artificial Sequence
  Optimized genes for Lactococcus lactis
atgaagaaacgagtgattgctgtttcagcacttgctcttgcatctgtggcagtgcttgcggggtgccgctctcatgatgctgctggtagcggtaaggccaaaacagatctcaaggctgcgattgtgactgagattggaggtgttaacgatcgtagttttaatcagtcggcttgggagggtttacaatcttggggtaaggaaaataacttgaagaaggggacgggctatacttattttcaaagtaatagtgccagcgattacacaacaaactacaatagtgcagagcaacaagggtacaaactacttttcggcactggcttttccttacaagacgccacctccgccgccgctaaaaacaatccgaagagcaactttgtgatcgtggattccgtaatcaaggaccagaaaaacgtagcgtcggcaacattcgccgacaatgagtctgcttacttggctggggttgcggcggcgaaggctaccaagacgaataaaataggctttattgggggaatgcagtccgatgtgattaccagattcgaaaagggctatgaggccggtgctaagtctgttaatccagacattaaggtcgacgtacagtacgccggtagcttttcggatgcagcgaaaggcaagaccatcgcagccgcgatgtatggggcgggtgacgatgtcgtttaccagtgcgcaggaggcgtgggtacgggcgtattctcggaagctaaggcgctaaactccactaagaacgaagcggacaaagtctgggtaatcggagtggatcaggatcaagagtaccttggcaaatacaaatcaaaagatggaaaagactctaattttgtcttggtttcaactataaaggaagttgggaatgttgtcaaagacattgcggataaaacaaaagatggaaaattccccggcggaacgattgtaacatatgaccttaagaacggtggtgtaaacttgggccttgatagtgccaactctgaaataaaagacgctgtcgccaaagcaaaagcagacatcattgatgggaagatcaccgtgcccagtaaatag

SEQ ID NO: 3124 - DNA, 1503 bp, Artificial Sequence
  Optimized genes for Lactococcus lactis
atgaaccagttgatctccacctttcaatcacagcagggacaattttggcaagcgcttctggagcacattcaaatcagcctaatcagtatctttatcgcaattttgatttctatacccctagcactcctactgcggcggttgccgaaaatagctgaacccgtactccaggttacaggaatttttcagactatcccaagtctggcgctcttaggccttctcatcccatttatcggtataggatccttaccagctattgtggccctagtcgtatatgccatctttcctatcgttcaaaacacatatactggcctcgagcaaatcgagccttctttaatcgaggcggcaactgcattcggtatgaatcggagggagcgactgatgaagttcgagttgtcgttggccatgcattttatcatggctgggattcgtaccagtactgttatggtcatagggacagccacgctcgccgcgttgatcggggccggtggactgggcaacttcattttgttgggcatcaatatgaatgacgtcagtttaatcctcattggggcaatatcgtcagcgttgctagcgataattttttcttctttgcttaaatttcttgaaaaggcgaagataaagaccatcttgatatcctttttcattggattattggtgttaggcggctcatattacaggcctcaaacgtcaaaccacccacagatcactatagcaggaaagttgggtgcggaaccggatgttctaattaacatgtataaacttatgattgagaaggattcgaatatacgggttaatttaaagtccaacttcggagacacaacttttttgtacaatgccctgaaggccggcaagattgatctgtacccggaatttacgggaactatcacatccacgttcctcaaggatcctgtttccagtacagaccctaacgtagtatggcagaaagcagaagaaggcatcaaaaaattaaatcaatttacatacttatcacccatgaagtttcaggatacttacgcaatagctgttaagagcgattttgctaaggagcatcaattaaccaaaatatcggacctagcaaatgtgtctgggttgacagccggattcgatgtagaatttgccaatagatccgatggcaatatcgggctcaggaagttatatgggctggacttaaacgtaaagactatgcagaactcgctcatttataaagcgcttaattctggtgctgtgaatgttgcagaagtttattcgacagattcccagattaagcaatataatctgactgtactgaaggacgacaaaaacctgtttccaccgtatcaggccgccccattaatgaaggaatccttgctaaaaaaatatccagagctaaaaaaaatcctcaataagctaagtggtaagatcacggatcaagaaatgatcgagatgaactatgatgtaaatgtcaaacaggaggacgccgcgaaggtagcggaacgatatttaaagtcaaaggggctcatttag

SEQ ID NO: 3125 - DNA, 1041 bp, Artificial Sequence
  Optimized genes for Lactococcus lactis
atgcttatacatcgaaaggagtgggataagttcttgactgacctacatcttaacgtttctaactcctcggaaattgaaacgattgatgaaaccgtcgcaatatttgccaaaaacggagaagttcttgctaccggctccatcgcagggaacgttatcaagtatgtcgctacttgtactaagggtgagcaatcggcaggcgaacgctttaacaagataatcacagaattaatgaacaggttagcacagaaaggtatataccatgtatttgtctttaccaaacctatgtatgccaaatcgtttggctacctagggttcaaagagttagctagggcggagcaaggcgtattactggaaaaaggccggcctaatattactgacttcctttcatcccttacagagaaaaagcttgtccccgcgggtgctaaaaaaatcgcagcggtcgtgatgaacgcgaacccgttcacattaggacactgttatcttgtagaacaagcagctgcagagaatgacttcgtctatgtgtttgtagtcagtacagatcggtccctctttcgcgcagacgagagactggatttagtaaagaaaggcttaagtgcattgacgaatgttagcgtcgtgagtggaggggactacctggtttcatttgctacttttccagcatactttatccagtcagacgaggaggtaatggatttccaaactcaaattgacgcacgaatattcaaaaattggtttgtagaagcgcttggtattacgacaagatacctcggagctgaacctttctcaaagactacttctatttacaatcaacaactaacggaggttttatcggacgttattgatgtcaagataatcgagagaaagaaggcggacgacaacgaggagattatttcagctacggcagtacgggcagctattgctactaatcaacttgagaagatacgtaatttcgtacccgagacgaccttcgaattcatcgaacaacatctgcaagaattgcaagcccgtatcaagggaggccaaaagacgaatggcaattaa

SEQ ID NO: 3126 - DNA, 291 bp, Artificial Sequence
  Optimized genes for Lactococcus lactis
atggaaatcaaacagcatgcgctggcaggaaccctcgaatcgagcgatgttcagataatgattgcgcctgccaataacggcatctcaatcgatcttatttccgacgtgaagaaacaattcgggaagcagatagaggctacggtccgccaagtgctggccgcttacgcaatagaaaatgcagacgtgcaggttattgataagggagctttggacttagtgataaaggcacgagcgatagcagttgtagagcgcgcgatcgaggcgaaggacctgaattgggaggtattatga

SEQ ID NO: 3127 - DNA, 915 bp, Artificial Sequence
  Optimized genes for Lactococcus lactis
atggctgtagcggagcgactcagaaggacgatgatgtttgttcccggaaacaatccggctatgataaaggacgcaggcatctttgaggctgacagcataatgttcgatctcgaagacgcggtgtctctggcagaaaaagacgcagcgcgtgtattagtgtatgaggcggtaaaaaacattgattttgggggagccgaattggtagtacgaattaatggtctggatacaccgttttggcagaaggacgtcagagcaatggtcaaggcgggaatagaggtaattcgcgctccgaaggtggaaactgcggccatgatggaagagttggaagtagaaatagagaaggcggagaaggagtttggaatcgaggtagggaccacccacgtcatggcggcgctggagtctgcgttgggcgtgatgaacgccttagaaattgcacggtcatgccccgagcgaatgatgggaatagcgctatctggaatggactatcgagtggacatgaaaacaaagtcttatccagatgagggggagctctactttgcacgtaacatggtgttgcacgcggcaagagccgccggtgtcgcggccttcgacaccgtattcggtaacgttgacgacgaagaaggtttcgttaaaggggtagagctaatccaccaacttggatttgatggtaagtcagtaatcaatcctcggcagattccccttgttaataaggtgtatgcaccgacaaagaaggaggttgtgcacgcccaacaggtaatggaagctatagaagaagctaagcagaaaggcagcggagttatttcccttaatgggcagatggtcgatcgaccgatagtactccaggctgagcgagtcctgatgttggcaaaggccgcaaacgtcttggacgagggtggcaactatattgagaagtga

SEQ ID NO: 3128 - DNA, 1539 bp, Artificial Sequence
  Optimized genes for Lactococcus lactis
atgaaaaacaaagtaaacagagagctgcctgatgagatcttaaagacaacgggctacaaacctttcgaaagcgttgaagtaaaggacctggtaattgaacgggtcagtgcaaaagtgcggcaatcagtcaagcctaacaagctggtcgactccttggaagaggtggttcttaaaactgtcaaggacggaatgactataagtttccaccatcatttccgggaaggtgactatgtattcaataaggttatgcgaatcattatcgatcatgggttcaaagacctgcgcatagcgcctagctcgctgacaaatgtgatgaatgatatcctcgttgaggcgatagaaaaaggcgttgtaacgaatataacgtcgtctggcatgcgaggcacgcttggggatgtagtcagtcacggtgcccttaaaaatcctgtaatttttcgcagccacggcgggcgcgctcgtgcaattgaaacaggggagatacatatagacgtagcgtttctagggacacctaatgcagatgagatgggaaacgccaatggcatggatggtaaggctcccttcgggagcttaggctacgccttgatggacgctcaatatgccgacactgtagtagccataacggacagcttagtatcttacccaaatacgcctgcaagcataaagcaaactcaggtggactatgtggtaaagattgatgcagttggtaacccggataaaattggagcgggggcgacccgttttaccaaggatcccaaggagcttaagatcgcctctatggtaaatgatgtgatcgtgaattctccatattttaagaatgggttttcatttcaaactgggacagggggggctgccctggctgtaactcgtttcctacgacagtctatgatcgatcacaacgtaaaggcaacattcggcttagggggcattacgaagccaatggtagatttgctagaggaaggactcgtcgataagcttatggatgtccaggacttcgacggggggtccgcccagtctatgcatctgaataagaatcagcaagagattgacgcttcgtggtacgcagacccagctaataaaggggctatggtcgataaactggatgtagtaatcttgtcggccctagagatagacacaaaattcaatgtcaacgttatgtcaggatctgacggggtaattcgtggtgcgatagggggccaccaggatgcagggaccgccaagctcaccataatatccgcccctttggttagagggcgaatagcgaccgtggttcccgacgttacgacagtgataacacctggtgatagtatagacgtcctcgtcacggagattggaatagcgataaaccccaaaaggactgacttgctcgacaaattgtctaatatcccaggattaccggtctacacgatagaagaactacaaaagattgccgaagaaaaactcggaaagccagagcctctggaattcactgataaagtagtcgctctgatagaataccgagatgggtccctgctcgatatcattcgagaggtaaaggattaa

SEQ ID NO: 3129 - DNA, 663 bp, Artificial Sequence
  Optimized genes for Lactococcus lactis
atgaaaaagatacagatcgctatagacggtcctgcttcgtcaggaaagagtactgtagctaaaatcatagcgaggaacttagatcttatttacctggatactggagccatgtatcgagtagcaacattcgtagcattgcagaaggaaactgatgacgcaaaagaaattattgaatttattgaaaagaaccccattagtttcatgaatggccaaaaggggcaggaggtactaatggggtcagagaacgttaccgaagtaatacggacgaacgaggtgacgaacactgtctccaagatatcagcgatgacagaaatccgcgaattcatggtagcagaacagcaacggattgcgaaaaacgggggaattatcatggacgggcgggatattgggacagtagtgcttccgaaggcagatttaaaaatttttctagtggcatcggttgacgaacgggccgaacgccgctacaaggagaatcttagtaaaggaatccctactgatttagaacgccttaaaatagaaatctcggaacgggatcgaaaagatagtacaagagctatctcgcccctaaagcaggctgaggacgcaatcctgctggattcaacgggcaagacgatcaacgagattgtccaattcatcgaggataaagccaaggaattaatgtga

SEQ ID NO: 3130 - DNA, 609 bp, Artificial Sequence
  Optimized genes for Lactococcus lactis
atgaaggagatttacgataaaatacaagacataaatataatactaaaacgtagcttcatagacctggggaaaccccttgcgtaccaggaagtggttgagaaatctgctaaggttctggaaagttctctttttatcattgataccaaacggaattgtctaggatatggctttacagacagcgacaactcatatcaagacgatataaaccttcaaaatttttttatatatcagaaaattagcaaagatataagtagtcagcttctaaaccactacgaaatgtcggcgtccttgccaatggcccagtctatattagaacccgtgaaagagatctcgtctaagttcccgaacaaattcctctcttttcttcctattgagggaaaccatcttaggttgggaactctcttcttgctcactgattctccgcttgaggaggaaaagcggatcttggtcgacttcctgtctaccttcatcggcaatcagatgtcgtacattatgctcgcagagttagaaggacagcgacgtaacgagacttttgtctccctagtgcagtcactgagtcgaagcgagttggaggcgttcaaatccataatcgagaagatcgaccgctag

SEQ ID NO: 3131 - DNA, 432 bp, Artificial Sequence
  Optimized genes for Lactococcus lactis
atgatacgcattaaaatgaaaaatgaaatattgatgacgaaggccttcacgctccttgaatcgttactggtgctattaatcatctcattcatcacgacgttattctccctcgaaattatccagaccattcatctctttaagggcgagttatttgttctacagtttgaaaacttctataaacgaagtcaggaggacgccgcgttgctccaaaagtctgagtcactggttgccaagaatcaggagctcatctgcgaggacagaagcataacgattcccaaggaagtggcggttaaagacttcactgttaaatttgatgacaaaggtgagaactcatctttgcagaaacttaccattagtttgccctacgaaaaaaagtttataacataccagctagagataggcagcggaaaattcaaaaaaaagatatcgtga

SEQ ID NO: 3132 - DNA, 594 bp, Artificial Sequence
  Optimized genes for Lactococcus lactis
atgactgacaactttttcgagaagacgttggcggcccgcgagatatcacagattcccggcatgcttgaattcgatatcccagtacatggcgacaaccgaggttggttcaaagagaactttcagaaggagaaaatgatgcctctagggttccccgagtcctttttcgcagaggagaaactccagaacaatgtgtccttttcgcggaagaacgtattgagaggattacacgcagaaccatgggacaagtacatatcagtagccgatggcgggtccgtattgggcgcgtgggttgacttacgcgagggggaaaattttggccatgtttatcagacagtaatcgacgcctctaaagggatcttcgtgccacgcggggtggcgaacggatttcaggtgctgtcggatacagtgtcctacagctatctcgtaaacgattattgggcactagaattgaaacccaagtacgcttttgttaactacgcagacccgaccttgggaatcaaatgggaggacgttgagaacgcagaagtatctgaggctgataaaaatcacccgctattaaaagacgttaaagcgttgaaagccgacgaattatag

SEQ ID NO: 3133 - DNA, 198 bp, Artificial Sequence
  Optimized genes for Lactococcus lactis
atggcacagggcaccgtcaaatggtttaatgcgaccaaaggctttggcttcatcaccacggaggagggcaacgacgtctttgcgcatttcagcgccattcaaacagacgggttcaagaccctagacgagggtcagaaagtcaccttcgatgttgaagatggccccagagggccacaagctgtgaatatccaaaagtag

SEQ ID NO: 3134 - DNA, 1410 bp, Artificial Sequence
  Optimized genes for Lactococcus lactis
atgggttttatgcgcaaggccgactttgagctgtatcgtgatgctgacaagcattacaatcaagttctcacaacacgcgattttctcgctctgggggtgggtacgatcatatccacatcaatttttacgttacctgggcaagtcgccgcccagttcgcaggaccaggtgtcgttttttcttatttactcgctgcactagtcgcgggctttgtggctctagcttacgcagagatgagcacagttatgccctttgcggggagtgcctattcgtggatatcggtcctgttcggggagggctttgggtggatcgcaggttgggcgctattggcagagtacttcatcgcggtagcgttcgtgggatcaggttttagtgcaaatcttcaacagttgctcgctccgctaggtttccatctacctaaagttctagctaatccatttgggactgatggcggcgtcgtcgacatcatctccctcctagtgattctgttgtccgcgatcatcgtatttaggggtgcatctgatgccggtagaatttcccaaattctagtagtgctaaaggtggcagcggtaatagcttttataatcgtgggtataaccgtcattaaaccagccaattaccacccgtttatacctccgcataaccctaaaaccgggttcggtggattttccggcatttggtcaggtgtttcaatgatatttcttgcgtacatcgggtttgacagcatcgctgcaaactctgctgaggcaaaaaagcctcagaagacaatgcctcggggaataattgggtcgcttttaatagctgttgttctttttgccgctgtcacattagtgttagttggtatgcacccatactcagcatatgctgggaatgctgcccctgttggctgggcgctacaacaatcgggatacagcgttctatccgaagtggtaactgcaatagctctagccgggatgtttatcgccttacttggcatggtcctagcaggttctcggttactttacgcgttcggccgagacggattgttgcccaagggactaggtaagatgaatgctaggaatctaccagcgaacggtgtttggaccttggcgatcgtggccattgtcataggtgccttcttcccattcgcattcttagcccaattaataagcgcaggtacgttaatagcattcatgttcgtgactctcgggatttatagcctgagaagacgacaaggcaaagacctgccggaagctacctacaagatgccgttctatccggttcttcccgcgttaggattcataggaagcttgtttgtattctggggtctagacgtacaggccaaactttacagcggtatttggttcttgattgggattctgatttattttgcgtacggcaaccggcgctctcggaagtcggaagaaaagtga

SEQ ID NO: 3135 - DNA, 456 bp, Artificial Sequence
  Optimized genes for Lactococcus lactis
atggcgggccaaaagaatacaagcgatataatagaggcctatttacgcaagttattagaggaagcacaggtaatagagatcaagcgtgccgatctcgctaaccagttcgatgttgttccttcacaaattaactacgtaattaaaactcgtttcacagcatccaaggggtttgacgtagagagtaaacgggggggtggcgggtatattaaaatagtgaaataccagtattccgctcgtcacgagtttctgactgctctctatcagaaggtcccggcgaatctatcttcgaaagcagcacacgatatcgtacagttgcttttcgatgagaaggtgctcacggaaagagagggtaatttgcttctgctagtaattactgatggggccatttccccgtttactagaggtattatgatgaagtcaatcatcaaccgcttggatcgtgacgacgagatctag

SEQ ID NO: 3136 - DNA, 1347 bp, Artificial Sequence
  Optimized genes for Lactococcus lactis
atgaaaatctacaatacctatagcaggcaactcgaggactttcagccaatagaaccgggaaaagtgaaaatgtacgtgtgcggaccgactgtctacaactatatacacgttggcaacgcgcggtctgttgtcgcattcgatctcgtaaggaagtatttggaatttcggggattcgaggtgcaatacatctcaaattttactgatgtagacgacaagatcatcaatggcgcaaaggcggcaaacatgacaacgactgatttctctgaacggtatattgctgccttttacgaagatacggacgcactcaacgttaaacgcgcgtcacaaaatccgaaggcgacagagttcattgaagctatgatagagtttatccaggagttggtagataaagaatttgcatacgtttcacaaggtgatgtgtattttcgtgtatcaaagtctaaggactatgcaaaactggccaataagaatcttgcagatctgttagcgggtgcaagtggtaggacagatgaggagaccaagttgaaggaatcaccagccgatttcgcgctctggaaaagcgcaaaggccgatgaggtatcatggcaggccccttggggtgcaggtaggccgggttggcatattgaatgtagcgttatgtctacgtcactactgggcgagactatagacatccatggaggtggcgcagatctagaattcccgcaccacactaacgagattgctcagagtgaagcgaaaactgggcaaaagttcgttaactattggatgcacaacggctttgtgaatgtggacggagaaaagatgtccaaatctttggggaattttaccaccgtccatgagctcctccaggtagttaacccccaaatactaagattctttctggcaacaacacactatcgcaggcccgtgaacttcactgatgatgcactgacagaggcagagaataatattaaaaaaatcgaaaacgcgtatagacacctcgatgaacaagccgaatcgaacctatctgcgttgaccacgttccgaaatgactttgtagcagcgatggatgaagacttcaatatcgcaaacggaatgacagtattctacgattttgtgagctgggtgaataaaggaaacgggggccctgaagtgaaagagttctttgatcaagtgctagaaatcctgggtattaaattcaaatttgaacaatcactagactcagagattgaggctatgatagaggctcgccaactggcccgggaagtacgtgacttcgccaagagtgatgaaatacgcgacgcgctaaaagcacagggaatagtattagaggatacgaaggacggagtaaggtggcatcgggaatag

SEQ ID NO: 3137 - DNA, 1308 bp, Artificial Sequence
  Optimized genes for Lactococcus lactis
atgaaaaaaatagccataatcttctgctctttccttatcagcctttcggtcctaagcgatttcagcgtatcagcagccactaccccgacaacaaatgatttcacagtcgcggccaagtctgcaatcgccatcgacgcatcgagtggcaagatcttgtatgcccagaattccgatgacgcgtcaacgcggatcgctagtattacaaagctattaactgcctacttagtctataagaacgtggctgaaaacaagctcacttggaataccaaggtccctatttccgattacgcttatgagctaacccaaaacagtaatgcctccaatattccgcttgcgcaaaatgggcagtacaccgttaaagatctgctaaatgccctcctactaccttcagccaacagcgctgcggtggctttagccgaaaagattgcagggtcggaaccgaaattcgttgatatgatgacgaagcagatgaaggactggggaattaccgacagccatttggtgaacgctagtgggttgccaaatgatgacctaaacggacatatatatcctggaagtggagctagcgctacgaacacgatgtcggctaaggcggtagctaccctgtcttatcatctcatacaggatttcccggaaatcctacaaataactaagaaaactgagattccttttgataccgggaatgaagctaagatgaccttgactaatacgaatcaaatgctgagtgggtttagcacctctcgaactggagttgacgggctgaagacaggctccacgtctttccaaatcgattgttttgccggaaccacgaaccagaacggttttcgcattatcaccgtagtattggaggcaactgaccccgcggcagataactcaaccccgttcacattgacgaaccaattaatgaactacgtttatggacactggcgaacaacctctttagtgcagaaaaaccaaagcctggacgacttcaaggagattaccgtcatcgatggtaaagagaaatcagtacagttggtggcgcctcaaaatataacaccagtagtaccgtatgccactgacggatcggcagacactaagtccctaaccgttaagttttccaaggagaagacggcgtctgttgaagccactgtaacaaaaaatcagaaactggtcacgctgtctacgactgtgaaagactcacttggatatcttcccaactgtacggctgagcaaatcccacttgtcgctaagaagacagtgcctagatcttctgcaccgaaagtattctggaatcatttcgtcaactttgtcaatgagaagctgtga

SEQ ID NO: 3138 - DNA, 747 bp, Artificial Sequence
  Optimized genes for Lactococcus lactis
atgaaacggaggataacattctcgcttattgtgctcgtcctactgataattggagcgctaggatttattctgataactaacgacaagagtaactccactaatgaaagcgcgaagaagaccagtataagttcatcgaaagaggtagccaagaaaaaagacctcccagatgctaagcagtctgactgggatctcgttttagtatccagaaagtccccaaaagacgagatgaatcccactctagcgaccgtaaatggtatccaggttgatcagcgcatcgcaagtgcagtacagcaattcttagctgctgcgcaacagatttccccggcagaacacctcatatctggctaccgatcagttagctaccaggaaggcttataccagtcatatgtacaagccgagatgaacggacaaggcacagtcaattccagtggtaacccgatttccgaagaggaggccatcaaaaacgttcaaacttacagccagccgcccaggagctcggaacatcaaacaggcttagctattgatatgagtaacatagactctctaaatgagtcacagtatgccaaacaggtggccgctattgctcctaagtatggcttcgtgctacgatttccagaaggcaaaaaagcggagactggaataggctacgaggactggcacttcagatatgtagggttggaaaacgcaaagtacatgacggaacataaccttacgcttgaggaatatcttaagttactgccggcgtaa

SEQ ID NO: 3139 - DNA, 240 bp, Artificial Sequence
  Optimized genes for Lactococcus lactis
atgaaggaacagatattcgatataatcgaaaccgtaagcggcaccgacgaattcagagaagatcttgatatggacctatttgaagaagggattttggactctatgcgtgccataatgctcatagtggaactggaaggtgctttcgacatatccctgcctccgtccgagatggaccgagaggattggaacactgcaaataaaatagcggcgcgagttcaggaaaaaaaagacgaaaactga

SEQ ID NO: 3140 - DNA, 1659 bp, Artificial Sequence
  Optimized genes for Lactococcus lactis
atggcctaccaagccttgtaccgaaaataccgttctcaacgttttgacgaaatggtgggacaagaagttgtagctactaccttgaagaacgccattgtgaaccaccaaatatcccacgcatacttattcagcggcccacgcggtacgggaaagacaagtgccgcgaagatctttgctaaagcgatcaactgtccgaaccaggttgacggagaaccttgtaacaactgttttatctgtgacagcatcacgaaagggtcgctggacgatgtaatagagttggacgcagccagtaataacggggtcgatgaaatccgtgagattagggataagtcgacctacgcggcctctcaagcaacttacaaggtatacataattgatgaggttcacatgttgagtacaggagcgttcaacgcgctattaaaaaccctggaggagccaacggaaaacgtggttttcgttctcgcgacgacggagttacagaagattcccgccaccataatctcccgagtgcaacgttttgcgttcaaaagtatcacaacaggagatattcggacttaccttgcgaagatcatggctgatgaaggccttgaattcgacgggaaagctcttgatgtgatagctaaagccgcagaagggggtatgcgcgatgccttgtcgctcctggaccaggctttaagtttctcgagtggaaagttagaagagaacgatgcgttattggtaaccggctcgatagccgcagatgcgctggtaacctatgtggcagctttatttgaacatgatgaagccaaggcaatgactgagctggacaagatctttgcagaaggcaagaacatgttaaggttcaccgaagacctcctcgcgtacttacgcgatctattactggacaaaaactctcaatacgatcgcggtcaaatcttctcgtggattgacgtcgcaattgagtccttgaaaactataaaagagaccacgcaaaccaaaatcgccgctgatgtgatgacgatgagactggcagaaataggtcagaataacttgttaacggcatcacagggcgaaataccgaaccaactcacagcggaaatcgcgaccctgaaaactgaaataaatcagctaaaggcacagatctcagctgggcaaattcaggttaatagcgacagccaaaataatctacttacagagaacgtgaaggcttcacctaagcctatagcatcaaaaaaacgacaaattaacaaggatttgatatataaggccctcgccgaggccactaacgaggctcgaaaggcagcgctttcggcttggccagaactggtagcgagcgtaactaagcccgcagaccgcgctttgcttaacaataccgcaccagttgcagcatcggaaaactttctagttgtgacttttcctcatgaaaacctcgcaaaacgggtgagcgagaatgaggagctacaactcttctgcgggaatttattaagctcaattgttggtttcgcgcctgaaatcatttcgctagccgaacaggattggcaagaagtgcgtgccgaatacgtgagtaatcttaaatcggaaaacgtacaggaggatgaagaggatgaaaaagaaccagacgagactgtcaacctggccaaagagttattcggtgaaaaggtcgttgagattaacgattaa

SEQ ID NO: 3141 - DNA, 447 bp, Artificial Sequence
  Optimized genes for Lactococcus lactis
atgtcaaatgaacatacccaagaggtactgaaccagacggtggccgacttaagtaaagcgtccgcactagttcatcaaattcattggtaccttcgaggaccaggatttctttatctacaccccaagatggacgaactcaaggatcagttagacgagcacttggatgagtttgcagagcggctcataactataggtgggtccccagtgagcacactggccgaatttgataaaaattcaaaaatagaaatgactcccgcggtatggggcaaatcaaattccgaacgtgtgaaagagttgattgtggcatacaaatatttaacacagcttttcaaagacggaattaagatagctggagacgacggtgatgatgtcaccgtggatttgtataccacagctttaggtgatatcgagaagaccctatggatgattgaggctgaagtcggataa

SEQ ID NO: 3142 - DNA, 558 bp, Artificial Sequence
  Optimized genes for Lactococcus lactis
atggttctggcgaaagatctgaaatccggcatgactttccttaatggtgagaagctcctgagggtcatggaggcctctcatcataaaccgggcaaaggtaacaccataatgcgcatgaaactaaaggacgtcagatcagggtcaactttcgatgacacctaccgaccggaagacaaattcgaacaagctgtaatcgagacggtcaccgcgcaatacttgtacagcatggatggcatagccaacttcatgaataatgagacgtacgagcagtacgagattcctgttgagcaggttaaagacgagctgttatatgtactggagaatacagacgtaaaaatccagttctacgggacagaggtaatcgggatacagttacctacaacagtcgtattggaggtcacggaaacacagccgagtattaaaggcgccacggttactggctcgggaaaacctgccactatggagactggcttggtcgtgaacgtaccagactttgtggaggccggaacgaagctcgagattaacactcagacgggcgaatatctaaagcgggcgtag

SEQ ID NO: 3143 - DNA, 1302 bp, Artificial Sequence
  Optimized genes for Lactococcus lactis
atgagcatcataacagatatctacgcaagagaggtactcgatagccgtggaaatccaactttggaggtggaggtttataccgaagacggcgcttttggccggggcatggtgccgagcggagccagtaccggggaacatgaggccgtggaactccgggatggtgacaagagtcggtataacggtctcggtacgcaaaaagccgtcgataatgtaaataatattatagccgaggcaattattgggtatgaagttactgaccagcaggctattgacagggcaatgatcgcacttgacggaactgaaaataagggcaagttgggtgccaatgccattcttggggtgagtattgctgctgcgcgggcggcggctgatgagctcggcgtcccgttatataattacctgggtggatttaacgcaaaggtgttgccaactcctatgatgaacataatcaacggtggttcgcattctgacgcacccatagcgtttcaagagtttatgatcgttccggttggagcccccacttttaaagaggcccttaggtggggagcggagattttccacgctcttaagaagattctcaaggcgcgggggctagagacagcagtcggggacgagggtgggttcgcccctaaatttgacgggactgaagatggtgttgaaacgatacttaaggctatcgaggctgccggttacaaagccggcgaggatggagtaatgatagggtttgactgcgcgtcatcggagttttacgagaacggggtatatgactatacaaagtttgaaggggagggcggtaagaaattgagtgcgagcgagcaagtggattacttagaagaactagtgtcaaagtatccgattataaccatagaggatgggatggacgagaacgactgggatgggtggaagatcctaacggaacgcctcgggaagaaggttcagttggtcggggatgatttcttcgtaacgaacacgaaataccttgaaagagggatacgggaaaacgcctccaacgccattctgatcaaagtaaaccaaattggtaccttgactgaaactttcgaggctatcgaaatggctaaagaagccggatttacagcaatcgtctcccataggagcggggaaacagaagattcaacaatcagtgacatagctgttgccactaacgccggtcaaattaaaaccggctccctatctcgaaccgaccgaatggcaaagtacaaccaacttttgcgaattgaagatcaacttgcagaggtcgcacagtacaaaggcttgaaggctttttataaccttaaaaagtag

SEQ ID NO: 3144 - DNA, 1284 bp, Artificial Sequence
  Optimized genes for Lactococcus lactis
atgagcatagaagaggctttagaatggatacactctcgcctgaaattcaacatccgccccggactgtccagagtttcggcactactagaactcttagggcaccctgaggaatccctttcgatgatacatgtagctggtactaatgggaaggggagcacagtggcgttcacacggtccatattcatgcaagcagggctaaaagttgcaagtttcacatctccgttcataacaacgtttggtgaacgcatgtctattaacgcgttgccaatagcggatgacaagctcatctactacgtagagatgatccagccactggtagccgagcttgataaagatgccgagttaacgggcatcaccgaattcgaaattattacggcaatggccttcaaatacttctctgacgagcaagttgacttagcagttatcgaggtgggactcggtggtctactggattccacgaatgttatcaaacccgtagtatccggcataaccactattggtctagatcatatcgacattctaggaagtactatcgaagagatagccgctcaaaaagcgggaattatcaaaccagggatccctgtcgtcgttgggaatatcgaattgaaggctttgcgtgtaatctgggaggttgcgcgaaaaaacaccgcccgggtgtatcagttcccatacgactatcgcacagaagtagaggagcatgagcactttaactttttttctgggcaagaagccattttagatatcgagaaatcgttggtggggcttcaccagatagagaacgctgggatggccatagaactatcattagtgtacgcgagcaaggtcggcatagagcttaccgaagacgtaattcgtagcggcatccgtgaggccttttggcctgcccgtatggaaaaactgggtgaaaaaccgttgatacttttagacggtgcacacaacgtccacgccatgaaccggttgttggaaaacctttccagcgagttcccggacaaaaaaattaccataatattttcggcaataacgactaaagacatctctcaaatgattaagatgcttcaaacggtaaaaaactctcacctaatccttactacatttgattaccctaaagctctgaaccttggggacttccaaagactagaggaagaaggagttgaactggccccatcgtgggagctagcacttgtgcgtgcacagaaaaacttggcagaagatgatctcttactagtcaccggttcactatactttagttcgcaggtcagagaatttctgaagaaggagaagtag

SEQ ID NO: 3145 - DNA, 1509 bp, Artificial Sequence
  Optimized genes for Lactococcus lactis
atgaaaatttggacaaaactgggcctcctgacactagtggggctctccttaacatcgtgcgggtccaacacaaagaatactaaggggcaatcctcaagtagccagaaggtcgaaacttcagctggggcctctaaatccaatatttacgccgatccatcgacgctgtcagacaaatatgacgtgataattgtcggctctgggggtgctggtatgaccgctgctatcgaagcgaaagacgctggcatgaaccctgtcatattggaaaagatgcccatcgccggaggtaatacctctaaagcaagtgctggtttaaacgcgtctgagacctccgttgaaaaggcgcaaggggtcgccgattcaaacgacaagttttacgaggagacgctaaagggtgggggaggaactaatgataaggctctattacgatactttgtcgatcacagcgcgggtgctgttgattggttgaacaccaacggaattgttttggataatctaactacaacgggtgggatgagtgtatctcgtacccacagaccccatgatggctcagcggtaggtggttatcttgtgaaagggctcgaggaaaacatcactaaacggaacatccctctatttgtgaacagcgatgttaccaaaataacagagaaggacgggaaggtatcaggcgttaaggtgaagattgagggggaaacgaaggacatttcctcgaaggctgtagttgtgaccactggcgggtttggcgctaataaaaaaatgattgctaagtaccgcccagacttgaaggattacgtcacaactaatgcagcgggatctacgggtgatggaattacgatgatatctgaacttggcggtgagttagtcgatatggataaaattcagatacatcccaccgtatttcaaaagactggctacctggtctctgagtcaattcggggcgagggcgccattttagtcaaccagaaagggaaaaggtttttcaatgagatggatacacgcgataaagtctctgcggcggaactcaaacagcctggtaaatatagctatgtaatatttggggaggggacgaaggataaagtcaaagcggtcgaacagtacataagtaaagacatggtagttgaagccgatagcatcaagggcttggccgataagttagacattaacgaaaaggcattgacgtctacgattgacgggtggaataaggcagtctctaccaaaaaggacgaagacttcggtagaacgaccgggatgaccacggaggtgagtggaaagtactatgcgataaaggtcgcaccaggcatccaccatacaatggcaggggtaaagatcaacacaaacacccaagttttgaaaaaagacggctccccgatacagggcctttacgcggcaggcgaagtcacgggagggttgcatggggggaatagaattgggggaaatgccgttgcggacatagtgatcttcgggagacaggcaggtacgcaatccgccgcttatgcaaaaacgtcgaattaa

SEQ ID NO: 3146 - DNA, 693 bp, Artificial Sequence
  Optimized genes for Lactococcus lactis
atgagtatcatcaaactctcgaacgtgagcaagaagtacagtaacgggacaactgccttgagaaatatatcgttagagatagagcctggggaattcacatatattgtcgggcctagcggtgcggggaaaagcacattcattaaattgttataccgcgagctcaagatcgaccgtggaagtggaaccgtagcacagtatgatctctcaaagctgaaaaggcgggacgttccaatgttacgtcgcagtgtaggtgtagtcttccaggactacaaactgttaccgaagaagaccgtattcgagaatatctcctatgcgatggaggttatagggaaaagtccccgagaaataaaaaaaagggttaacgaggtgcttgatctggtgggactaaaacacaagatacggtcctttcctaatgaattgagtggaggcgaacagcaacgtgtagctatagcgcgatctatcgcaaatgcacctaaggtcctgattgctgatgaacccactggaaatttggatcccgaaaattcatgggaaattatgaacctgctagaaaaaattaatttacagggcacgaccattctgatggccacacacaacagtcagatcgtcaacacactcaagcatcgagttatagcaatcgagaacggcaggatcgtgcgggatcaagaggaaggcgtttatgggtacgacgactag

SEQ ID NO: 3147 - DNA, 2130 bp, Artificial Sequence
  Optimized genes for Lactococcus lactis
atggcgcgagagtttagtttggcgaatacccgcaatattggaattatggcccatgtggatgcggggaaaactactactactgaacgtgtattgtactacactggcaaaatccataaaataggagagacccatgagggcgcgtctcaaatggattggatggaacaggaacaagaacgggggatcacgattacgtcagccgcgactacagccgagtggaagggtaaccgtgtaaacataatagatacaccaggacacgttgacttcacaattgaggtccaacgcagccttcgggttctagacggagccgtaactgtattggacgcgcaatctggcgtagagccgcagactgagaccgtctggcgccaagccacagaatatggagtccctagaatagtattcgcaaataaaatggacaaaataggcgccgatttctactactctttatccacgttgggagaccgccttggtgccaacgctcaccctatacaaataccaatcggcgcagaggatgacttcatcggaatcatcgacctcgtaactatgaaatccgagatctatactaacgatctgggtacggacattaaagaaaccgtggtgggctcagatgagtttaatgctgagcttgctgctcttgacttcaatgccgaggagtacaccgagcttgcaaacgaatggcgtgagaagcttatcgaagcaattgccgacttcgatgaagatataatggagaagtattttgctggggaagagataccagaagctgagctgaaggcagctattcgtaaagcgacaattaatgttgatttctaccccatgctagcgggctccgctttcaaaaacaagggggtacaaatgatgcttgatgccgtgatcgattatcttccctcaccactggacattcctgctatacagggagtaaatcccgatacagacgaggaggatgagcgacccgcctccgatgaagaaccctttgcagcgcttgcctttaaaattatgaccgatcccttcgtgggtaggttaagctttttccgtgtatattctggaacgctggatgcagggagttatgtgctgaatacgtccaagggaaaacgtgagaggataggtcgtatattgcagatgcatgcaaacactagaaaggagatccaaactgtatatgccggcgacatagcagctgcagtggggttgaagaacactactacaggggatagtttaactgatgaaaaggcaaaaatcatattagagtcgatagaagtacccgagccggtaatccaattaatggtagaaccaaaaaccaaagctgatcaggacaaaatgggggtggcattacagaaactggctgaggaggatcccaccttccgagtagaaactaacccagagaccggggaaacagtgatctcgggtatgggtgagctacatttagatgtactggttgatagaatgaaacgggagtttaaagtggaagcgaatgttggagctccccaagttgcctatagggaaacatttcgtgcaggtacgtctgctcgcgggttttttaagagacaaagtggcggtaaggggcaatacggtgatgtctggattgaatttaccccaaatgaggagggggcgggattcgagtttgagaatgcaatcgtcggcggcgtcgttccacgggagtttgtcccggccgtagagaaaggactagtcgaaactatggctaatggcgtgctagcagggtatccgatggtagacataaaggccaaactatacgatgggagctatcacgacgtggatagctccgaaacagcgttcaaggttgccgcaagtctcgccatgaaggaggcagcaaagacggccaagcctgccatactggaaccgatgatgaaggtaactattacagtgccggaagagaacttaggagatattatgggacatgtcacggcccgacgaggtcaggtaaatagcatggaagcgcatggtaaatctcagattgtaaacgcttttgtccccctcgccgaaatgtttggttatgcgactactctaaggagttcaacgcaggggcgcggaacatttatgatggttttcgaccactacagcgacgttccgaaaagtgttcaggaagagattatagccaaaaatggcaggaacgcagactaa

SEQ ID NO: 3148 - DNA, 1011 bp, Artificial Sequence
  Optimized genes for Lactococcus lactis
atggtagttaaggtcgggatcaatggattcggacgtattggtcgactggctttcaggcgtattcaaaatgttgaaggagtagaggtcgttgctataaatgacttgacagatccagccatgctcgcccatcttcttaagtacgacaccacgcagggtcgctttgatggaaaagtcgaagtgaaggatggcggcttcgaagttaatggtaagtttgtgaaagtgacggcagagtcaaatcccgcaaatataaattgggcggaggttggtgccgaaatagtcctggaggctactgggtttttcgctacaaaagaaaaggcggagcaacacttacacgcgaacggagcaaagaaagtggtgatcaccgcaccaggagggtcggacgtgaagaccattgtgtttaatacaaatcatgaggtacttgacggaactgaaaccgtcattagtgctggtagttgtaccacaaattgtttggcacccatggctgatacattaaataagcagtttggaattaaagtcggaactatgacaaccgtgcatggatatacgggcgaccaaatgacactagatggcccgcaccgcggaggagactttaggagggcgcgcgcggccgctgaaaatatcgttcccaactcgaccggggcagccaaggcaattggacttgtcttgcctgagctacaaggtaagcttcagggccatgcccaacgagtgccagtaccgactggctccttaactgagctggtaacgatcttgaacaaggaggtcaccgttgatgagataaatgcagcgatgaaagctgcatccaacgagagcttcgggtataatgaagatcaaatagttagtagcgatatagtgggaatcagtaatagcagcttatttgacgccactcaaacagaagtcacatctgctgacggcgcccaattagttaaaaccgtcagttggtacgacaacgaaatgagctacacgtctaatttagtacgaaccctagcatactttgcgaaaatcgcgaagtag

SEQ ID NO: 3149 - DNA, 1878 bp, Artificial Sequence
  Optimized genes for Lactococcus lactis
atgaattttcaagagaattacgacgttgtagtgataggagggggtcacgctggagtagaggcatccttagctgctgcaagaatgggttctaagactctactaatgacaattaatctcaacatggtagccttcatgccttgcaatcccagcatcggggggtcagccaaaggtattgtggtccgtgaaatcgacgcgctagggggtgagatggggcgcaacatagacaagacatacatccagatgaaaatgttaaacaccggcaagggtcctgctgtgagagcgttacgagcccaggccgacaaggacgaatacgctgattcaatgaaaaacacagtctcggaccaggaaaatctaactcttagacagggaatggtcgaagagcttatattggacgaagaaaaaaagaaggtaataggaattaagacttccacagggacgaagtatggggccaaagccgtgattatcactaccggcacggccttgcggggggaaattataattggagagttgaaatacagcagcggacctaacaacagcctctcctctatcgggcttgcggataatttgcgcgagatcggattcgagattgggaggttcaaaacaggtacacctccgcgtgtgctcgctagctccattgattatgataagacagagatacaaccgggtgacgaagcgcctaatcatttcagttttatgtcctcagatgaaaactatttgaaggaccaaataccatgttggctgacgtacacgactgaaaatagccacacaatactgaggggcaatctgcatagagccccactattttcaggaattgtcaagggagttgggccacgctactgtccgtcaattgaggacaaaatcactcgatttgctgacaagccgcgccaccagctattcttggaaccggaaggtcgaaacacggaagaggtatatatcggagggctttccactagcatgcccgaggacgtacaattcgaccttgtaaaaagcattcccggtcttgaaaacgcacaaatgatgaggcccggatatgcaatagagtacgacgtcgttatgccccatcagctcagaccaaccctagagactaaattggtatcgggactatttacggcaggccagaccaatggaactagtggatatgaagaggcggcagggcaaggccttgtggcaggtattaacgcggcgcttaaggtacagggaaagtccgaattcattttgaaacgatctgaggcatacattggggtaatgatcgacgacttggtcaccaagggcacattggagccataccgcctactcaccagtagggcggagtacaggctgattctgcgccatgataacgcagatcgtcgtctaacggaaatcggacgacaggttggtctagtgtctgacgagcagtgggaacattatcaggcgaagatggcccagttcgaccgcgaaatgaaacgcctcaactccgagaaactcaagcctctgcctgacacccaagagaaacttgggaaacttggtttcggccccattaaagatgcgctcacgggcgcagagttcttaaaacgcccagaggtccattacaatgaagtcatcgacttcattggacaagcccctgaaaagatagatcgtacggtaattgagctgatagagaccgagataacatacgaaggttacatcaaaaaggcgatggatcaggtggacaaaatgcatagactagaagccaaacgtataccgaaaaatatggactgggacaaactggactcaatcgcaacggaagccaggcaaaaatttaagaaaatcaatcccgagaccctcgggcaggcatcccggatctctggtgttaatccggcggacatctctattcttatggtatacttggagggcaaatag

SEQ ID NO: 3150 - DNA, 369 bp, Artificial Sequence
  Optimized genes for Lactococcus lactis
atggtaaaagagcgagagctccgcaggtcaatggctgtcttgcccatcgggactgtgatgaaactgacagatttaagcgcgcgacaaatacgctactatgaagagcaggagttgatattccccgagcgttccgatggcaacagaagaatgtattccctcaacgacattgatgccctctttgacatagctgatcttctacaggaaggcaacaatattgccgatataaaagaaatctatgccaaaagagatgccaaaaaagcacaaacgctaagcataggggaggtgcatcacgcactggagcgcgagtttgcccaacaaggcaggtttgggacacctgaccccacacacttcacccagccacgcatgtga

SEQ ID NO: 3151 - DNA, 1440 bp, Artificial Sequence
  Optimized genes for Lactococcus lactis
atggcggacccaaacgggtttctaaactatcccagaaacgacaacccatatcgagaacttgctgagcgcattaaagacttcgccgagttgcaagttcctctttcgacggaggagaggcagaaacaagcggctcggtgtatgcattgcgatgttccgttttgtcatcaggggattttttacggaggaaagcgcgccgttagcggctgcccgaatgacaatcatataccagaatggaacgatctaatatatcgtggacttcagaggaaggcatatgaacggttgattctcacgaatccgtttccagagttcacaggtagagtatgtcccgctccctgtgagaagagttgcgcggaggctcttaatggagccggggtcaccatcaaagataatgaacgatttcttggagacttggggaacgatgaggggtgggttgccgagatcggcaaagccgctgagcctaccggatataaaatcgctatcataggttcagggccggcaggtctgagtgcagcatggcgacttaatcaactcggccatagcgtaacagtatttgagaagagtgatcggctaggtggcttgttaatgtatggtataccaaacatgaaactagataaaaaagtggttcagaaacggatagacttgatgactgaattaggagtaacttttgtgacaaatacggagataggaaagacgatatcttatgaggaccttagcgtcaacttcgaccgaataatattagccataggagcaggaatcccgcgggacttgaatatatcgggtcgcgaagccgtcggaatccgtttcgcaatagattttctaacggaaaccaccaagacagtgttagaagaaggtgaggacaacatttctcagtccttgaaaggcaagaaagtagtcgtgataggtggcggtgataccgggaatgattgcatcgggacagccgtacgtctgggcgcagcatcagtcagccagcttgaaataacgccttctctaccaacagatcggttagataacaatccatggccagagtggccaatgaccctcagagctggctatgggcagaaggaggccgaattcgtgggaaatacggacctgattacgtaccaaatgactgccacagcctttcagacgaatgccgaaggtcagctgacaggacttaaagttgctaaggttgggccggattttaaggcccttgaaggcacagaacaggtaatagaagcagatctcgtcttactggctatggggtttgttggtaccgataccgggttgcttgacaaattcgggatacaggaaatttacgatgactacagaacaaacaacgataaagtactcgtcgcgggagatgccagacggggcccttcattggtaatctgggctattagagaaggccgtaagacggcggagattgtcgacgaacaattaattaaagttgcaacggcttag

SEQ ID NO: 3152 - DNA, 540 bp, Artificial Sequence
  Optimized genes for Lactococcus lactis
atgtctgaggagacaaaggaggaaatcaagaatgagaaagtggacgaagaggttaccgaagagctcacagaagaagcattggaggatattgtagaggaggagataaacgagttggacgaggcacaaaaacttgcgacggagtgggagaataaattccttagggtgtcggccgagatgcaaaatgtccagcgacgcggtaacgaagaaaggttgcaactgatcaagtatagaagtcaagatctagctaaaaaaattcttagtagccttgacaacctcgaacgcgcgctagctgtggaaggcttaacggacgatgttaaaaaagggctagagatggttcaagaatcattaatttcggcgctgaaggaagagggtgtggaagaggtctcatatgagagttttgatcacaacatacacatggccgtacaaacagtaccggcggatgatgagcatcccgctgatagcattgtacaggtcttccagaaggggtatcagctgcacgagaggttactccgccccgctatggtagtagtagcacaatga

SEQ ID NO: 3153 - DNA, 2490 bp, Artificial Sequence
  Optimized genes for Lactococcus lactis
atgcaagataaaaatgtaataaatgtcaatcttgtagaggagatgaagacttctttcagagactatgcgatgagtgtgatcgtagcgcgggccttgccggatgtacgagacggcttgaagcctgtccatcggaggatactatatggaatgaacgaactcggaaataccccagataagccacataaaaaatcggctcgcatcgtaggagaagtcatgggaaagtaccacccacatggagacagctcgatctacgaagccatggttcgcatggcgcaatggtggagttatcggcatatgttagccgatgggcatggtaacttcggatccatggatggggacggagcggcggctatgcggtataccgaggcacgtctgtcgaaaattgctatggagatgctgagagacatcaataaaaacacagtggacttcatggacaatttcgatgggacggaacgagaaccgcttgtgctccccgcaagatttccaaatcttttagtgaatggtaccactggaatagccgttggaatggccactaacatacccccgcacaaccttggcgagaccatagacgcggttgatatgctcatggaaaacccagaggcttcggtcactgacctcatgagtgtaatcccgggcccggactttcccaccggggcccttgtaatgggtaaatcaggcatccgtcgagcttacgaaaccggtaagggtagtatcacactgcgggcgaaaacacacatagaagagatggctgggggaaaggaacgtatcgtggtgactgaactaccctacatggtaaataaggcacggttagtcgagcatatcgttcggttaaatcatgagaaacgaatcgagggcttgacagctgtgcgtgatgaaagtaacagggagggtattcgtgtagttattgaagttcgtcgagatttgagcgcccatgtcatcttaaacaatctattcaaactaacgagcttgcagacgtcattcggtttcaatatgttggccatagagaaaggaatacctaaaattttaagtttaaaagagatcctagttgactacatagaacaccaaatcgaagtcgtcgaacgccgcaccgctttcgacaaagcaagggcggaagctagagcccatatcctcgaaggtctgagaattgcccttgataatatcgacagaataattacgatcatacgtgagagccaaaccgatgctatagcgcagaagaccatgatggacgaatttttgttatccgaaaagcagtcacaagcaatcttggatatgagactacgtcgtctgactggcctggagcgcgataagatagaagccgaatatcaggacctcgtagctcttatagccgacctagctgatattttagcaaagcccgagcgtgttaagaaaatcataagagaggagttagaagaggtcaagcgcaagtttgccgacaagcgacgaactgaactactggttggcgaagtgttgacgcttgaagacgaggaccttattgaggaagaagacgtcctaatcaccctgtcaaacaagggttacattaagcgcttggcaaatgatgagtttcgagcgcaaaaccgggggggccggggggtccaaggtatggggatgagcgacgacgactttgtccagcacctggtgagcactagcactcacgatcatctactatttttcacgaacctagggcgagtctaccgaatgaagggatacgaaatcccggagtacggtcgaactgcaaaagggcttcctatagttaacctgctcaaattggatgacggcgagaagatagctaccataataaacgtcgacagggaccaggcggcaaagtatctcttttttaccacgcgcaatggaatagtaaagcgaacttctacatcgcagttttcgaacatacggacgaatgggttgaaggccctcaaactcagagacggggatgagctaatcaatgtgttacgcacgagcggggaggacgaggtaataattggaacacatctgggttactcagtgcgcttcaagggggccgtggtcagggacatgggccgcgcagccgccggggtgaagggcgtgaatctgagagagggcgactacgtcgtcggtacgtcaagaatagatgatagtcaagaggtgctggtcatttccgagaacggactaggcaagcgaacgcaagcaagtgaatatcccacaaagggacgaggtggcaagggtatgaaggtgatgaacgttacggagcgaacggggaagttagcgggtcttacagcggtgaatggggacgaagacttgatggttattacggacaccggagtaatcatcaggactaacgttgctaatatctcacagactggacgtgcagcacagggagtcaaagtgatgcgactagatgatgaggctcagattgtcacattcgcgttggtggacccggtaattgaagatgaagaggtggacgctcccgagcttaccgacgagaccatttcgactgataataatgaagaatag

SEQ ID NO: 3154 - DNA, 1224 bp, Artificial Sequence
  Optimized genes for Lactococcus lactis
atgaaggaacgcttaaaggcacctgaactaaggtttgacggattcaccgacgattgggaggagagaaaattactggataatgtcgagaaggtcctggactataggggtaagtcgccagccaagttcgggatggaatgggggaccgagggctacctggttctgagcgcgcttaatgtcaagaacggctatatcgataaaagtgttgaggccaaatatggcgaccatgaactgtttgataggtggatgggtaacaaccgactggagaaaggcgacgtcgtctttacaacagaagcgcctctaggtaacgttgctcaagtccctgataataatggttatatccttaaccagcgggctgtggcatttaagtcacttcaagagacggacgataacttctttgcgcaactgctgcgtagtcccatcgttcaaaacactctgaaagcatcgtcaagcggcggcaccgcaaaaggtataggcatgaaagagttcgcgaaactcaatgcgcgagtgcctgaaacgcacgaagagcaacgcaaaattggactttttttcaagcaactagatgatacgattgtgctgcaccagcggaaactagatttgcttaaagaacagaaaaaaggttatttgcaaaagatgttccccaagaatggcagcaaaattccggagctcagatttgcagagttcgccgatgattgggaggagcggaagcttggtgaggtagcgacttttctcaatggacgcgcatacaaacaggacgagttattggacagcggaaaatacaaggtattgagggtgggcaacttctacacgaacgactcttggtattactcaaacatggagcttggcgacaagtattacgtagacaaaggcgacctggtatatacgtggtctgcaacttttgggccccatatttggtcgggtgagaaagtgatctatcattaccacatttggaaggtagagctctcaaaatttctggatcgaaatttcactctgcagttactcgaagcggacaaagcccgactcctttcgagtacgaatggatcaacaatgatacatgtgacaaagggagacatggagagtaaaatagtctcgatacccaacatcgacgagcaaaagcaaattggttcgtttttcaaacagttggacaacactattactttgcaccagcgaaagttggatttactcaaagaacaaaaaaaggggttcctgcagaagatgttcatatga

SEQ ID NO: 3155 - DNA, 1065 bp, Artificial Sequence
  Optimized genes for Lactococcus lactis
atgttgatatctacaatggtagatgtatacgtagtctattaccctattattctgtcatttatatgggcgtcgggtgcctttctgtctcgttggaaagagcgcgataagaaggccatcgatgaaacaaaggaattcgaaaaaataagtattgtgatctcagcctataacgaggaagaaacgattgaggaggtgctcttgtcgctgcgcaacctgaattatccttctttggaaattttcattgttgatgataaatcgtcggacagaacattagagaaactttacgaggttaaaaagtcgtttgatgattgggagacactaactattttggagcagaaagagaacaagggcaaggcaacggcgctaaatgtcgcactgcaacaggttaatagcaaatacatgctcgtgatcgatgccgactcctatctgtctaaagacgccctgagttacctgcttgcggagctgaccagctcgtcagatatcggtgccgttacaggtcgaccgattgtgcggaatcggacgacactactcggtaaattacaaacgctagaatacctatcggtgattgatgcgataaaacgcgcgcagagcttgttcctcggcgccatcatgacagtgtcaggagtgatcgtgatgtatcgtgtagaagcattgaaagagattggagggtttaacactgaagtaatgaccgaggatattgatgttacgtggcgcctgcatcggaatcaatggaaagtaaagtatgttcctaaagcactttcttacatacttgtgccagagaatctgaagagccttctcaagcaacgccgtcggtgggcagtaggcggggttgaggttctaatatccaacctaagttgggtgtttaagagaggagagtttaagcatcggttcctgttgatcgagatgatctgtagccatatctggtcctggttctttttgatcgagtcttaccagtatttcctgcaaatgctcctcaaccaggaattcaaggttagcggccaaatcatagtcatattcgtcttgatctcgttctttgtgttttttctagggccgcaaatagtcaagtag

SEQ ID NO: 3156 - DNA, 2799 bp, Artificial Sequence
  Optimized genes for Lactococcus lactis
atgaaaatcaaggatacccttaacttgggtaaaaccgcatttcctatgcgagcaggcctccctaacaaagaacctaactggcaaaaagattgggccgacgcgaccctgtacgagaaacgtcaggaattaaacgagggcaaacctagtttcatgctccacgatgggccgccatacgcaaatggcaacattcatctgggtcacagcttgaacaagatcagcaaagatataatagtgagatataaatctatggcaggattccgcgctccgtacgtgccaggatgggatacgcacggcttgccgatcgaacagcaattagcgaaggcggggatgaaacgaaaggaaatggatcttttagactatcttgaagagtgtaggaaatacgctatgaaacaagtcgacatgcagcggagcgacttcaaaagcttgggcgtattagctgattgggatcggccatacttgactttgttacctgaatacgaagcggcccagattagagtcttcggaaagatggccgagaaaggctatatctataaggggcagaaacctatttattggtcgccctccagtgaatcgtcgcttgcagaggccgagattgagtaccaagacgtacgaagtgcctcaattttcgtcgccttcaaggcgaaggataccaagggcaagctacctgaagatgttgaatttgtcatctggactactacgccatggactattccttctaacctcggcattttcgctcatcccgactacgattacagtgttgtagctgtcaatggccgtaaatttgtaatcgcatcggagatgctggaagccgtagcagagaaattggaatgggaaaacccagaagtactgcaaactataaaagggtcagaattagaatatatggtggctaagcacccgttctacgatagagaaactttaattatgaacgcggattacgttacattggattcaggaacggggctcgttcatgtcgccccaggtcacggcgaagatgattacttcgcttcgcgaaagtacaaattgcctgttctctctccgattgacaataggggatattataccgacgaagccccaggactcgaaggtttgttgtatgacgaaggaaacaaagtcgtttcgaagtggctcgaggagaaagatgcccttttgaaattagagttctttacccactcctacccacacgattggcgcacgaaaaaaccagtcattttccgtgccacaccgcagtggttcgctagtattgatgactttaggcagaacattttagatgaggtcgaacgtgtcgactgggttatcccttggggtaaaacaagactattcaatatggtccgagatcgcggagactgggtaatttcgaggcagagagcgtggggggtaccattacctattttctacggcgaaaacggtgagcctattattaccccagagacgaccgagcacgtcgctaaattgttcgcggaatttggttcaaaagtgtggtttgaacgtgaggccaaagatctgttacccgagggttttacgcatccggcctcgcccaatggggagtttactaaggagaaggacatcatggatgtatggttcgacagcggcagcagctggaacggcgtgcttaacgagagggattatctcagctttccggctgatttatatttggagggtagtgaccaatatcgggggtggttcaacagcagcatcaccacgtccgtcgcagtcaatggtgtcgccccatataaggccgtgctgagccagggatttgtactagatggtaagggcaggaagatgtctaaaagcattggtaatacaattgtccccaaagacgtaaccaaaaaatttggggcggacattttaagactatgggtggcgagcatagatacggagtcagatgtacgggtaagtatggatatacttagccaggttagtgaagtatacagaaaaatcaggaacacgctgcggttcctcatcgctaacacgtcggactttaaccctaaagaggatgccattgatttcgctgaattaagaccggtcgacaagtacatgttagtaaaattcaacgaattggtcaagcaaataagaacggcttacgataattactcttttatgactgtatataagtccattatcaacttcatcacgaacgacttatcatccttttaccttgacttcgcaaaggacgtggtctatatagaggcagcaaattccccagagcggcgatcaatgcaaaccgtaatgtatgtcatactcaaggacctagtgaagatactggtccctatattgccacacacggccgaagagacgtggacctacttggagcacgagccagagaacttcgcttatctcgcggaaatgcctgaagccgcggagattcccggctccgaagagctgctgggcaattggcaggaattcctcgacttcagggataaaatcctcaaggccctagagagcgctcgtgaggctaagttgataggtaagtcgctcgaggctacggtaacaatttatccaaatgaagttgttcgtacacttttgactgctattgatgagaatgttgcccagctacttattgtatcgaattttgtcgttgcaaatgaacctgttaacaatgcacccgaatcggctatgaagttcgatgacttggctgtgttagtagaacacgctgcgggtgaagtttgtgacaggtgtcgacgtacggatgagactgtcggccacaacgccaatgagcatttaaagatgttgtgtgagcactgcgctcatattgtggagaccgagttccccgagatactcgaggaggggttcgaagattag

SEQ ID NO: 3157 - DNA, 1023 bp, Artificial Sequence
  Optimized genes for Lactococcus lactis
atggccgttactatgtattacgaagatgatgtagaagtctcagcgttggcagggaaacaaatagcagtcattgggtacggctcgcaagggcacgctcatgcccagaatttacgagactcgggtcacaacgtaattattggagtgaggcatggcaagtctttcgacaaagctaaagaggatgggtttgagacttttgaagtaggcgaagcagtcgcaaaagcagatgtaataatggtcctggctcctgatgagctgcagcagtccatatatgaggaggacattaagcctaatttgaaggcaggttcggctctcggttttgcacatgggtttaacatacatttcgggtacatcaaggtacccgaggacgtagatgtctttatggtagcgccaaaggcgcccggacatctcgtgcggcgtacttataccgagggcttcggaacccccgccctgttcgtctcgcaccagaacgccagtggtcacgcccgtgaaattgccatggactgggccaaaggaataggttgcgctcgtgtgggaataattgagacgaccttcaaggaagagacagaggaagaccttttcggtgagcaggccgtgctctgtggcggtttgaccgcactcgtagaggcggggtttgaaacacttactgaggcgggatacgccggagaactcgcctattttgaagtactacatgaaatgaaactgatagtggatttgatgtacgagggtggctttaccaagatgagacagagcattagtaacacggcagaatttggcgactacgttaccggtccgagaattataactgatgccgttaaaaagaacatgaagttagtactcgcagacatacaatcgggcaaatttgctcaagatttcgtagacgactttaaagcaggccggcccaagctcaccgcataccgagaagcggcgaaaaatttggaaatcgaaaagataggcgccgaactcagaaaggcgatgccgtttacccaatcaggggacgacgacgcttttaaaatttaccagtag

SEQ ID NO: 3158 - DNA, 477 bp, Artificial Sequence
  Optimized genes for Lactococcus lactis
atgaggaggatgattatagcgaagttacataacgttaccgggataatgaaccgattcaccgccgtactaaatcgaagacaggttaatatattatcgatcacggcaggggtcaccgaatctcaagacttaacccatacaacgttcgtaattgaagtagatcacctagacgaagtagagcagattatcaagcaacttaatcggctcatcgacgtcatagaagttgccgatattaccgacctgcctcatgtagaaagagaagtcgtattaataaaggtaagtgccccaccaactattcgtgcggaaatctttactatgatcgaacctttccgagttaacgtggttgatgttaacttagagaatgtaacgatccagctcaccggcgactcagcgaaaattgaggcgcttatagacgtcgtcagtccgtatggaatcctcaacatggctcgcacagggtcagccggctttgagaggggttga

SEQ ID NO: 3159 - DNA, 219 bp, Artificial Sequence
  Optimized genes for Lactococcus lactis
atggcgaaggacgatgtcatagaagttgacggcaaagtcgttgatacaatgcccaacgcaatgttcacagtcgagctggagaatggtcaccaggtgttagcgacgatctccggcaaaattcgaaaaaactatatccgcattttgcctggcgataaagtacaagtagaactatctccttatgatctcacgaggggaaggatcacctacaggttcaaatga

SEQ ID NO: 3160 - DNA, 951 bp, Artificial Sequence
  Optimized genes for Lactococcus lactis
atgactgagtttattacattaggagagccactcgttgtgctagcgtctgaaaatcaagacatctccctcgacgtggctgaacacttctccaaatatttggctggggcggaactgaacgttgccataggtctctcccgtttgggtcacaagggcatctatctttccaaagtgggcgaagactctttcggtaatttcattatcgagtcggtcaaaaaagcggaaatcgagacaacctatctcacaaaagacaaaaactattccacgggtttctatttaaagcaaaaagtgtctgaaggagatccgaaagttgattactaccgaaagaacagcgcagccgccaatctttctatcgcagagcttaaggccctcgacctcagcggtattaaaatagcgcatctgtccggcatattccctgcgctcagcgagacttcgttaaagaccttccaggcatttaaccaaaagctaaacgaagcagatattctgacaatcttcgatcccaatcttcgtccagtactttgggataaccaagaaaaaatgattcgcacgattaatgaccttgccaaacaatctcaaatcatattacccggcattaatgaaggagagatcttaacgggctcttctgaaccggagaagattgcaaatttttacctcgaacaatccccgctgactaaaatagttgttgtcaagctcggagcggacggagcatttgtgaagttgaagaatggcgagcaatacttcgtgtcgggttttaaggtggcgaaggtcgtagacaccgttggtgccggcgacggattcgcggttggattggaatctgctttgctggagggaaagacgctaaaagaagctgtgaaacgcgcctgcgccgtcggcgcgttagcagtccaatcatcgggcgattcagaaggctatccaacaaaggaggagcttaaggctttctataaagaaatgtga

SEQ ID NO: 3161 - DNA, 1443 bp, Artificial Sequence
  Optimized genes for Lactococcus lactis
atgattaagttctttaacagtatgatctttaagggcgtggtcgcacatctactactcttcgtcatattattcatgagctcctttgactacaattttgcccatctcagtacgttcattggttattacctgttctcactcgtttttgtacttgtctttttgaaccagcaacaccgaatgattgttaacgtgtcaaaacagatgaacgacattaagaatgggtacttgaaccgtgacaagattcctaagggaacgtcggaaataaatgaactttacgatgagattttaaaactaggcgaagacattgttagaacccagaataacttagagaaccagcggaaccagctagactcaatattagcttatatggtggacggtgtgattgccacagatcgtaggggcaatatcataatggcaaacaaatctgcactacactatttaaacacggataacgatctactgatgcagaagaatatcgtagaagtactcaagattacggaccaatacaacttttacgacctactagagaaagagcccgaaataacgattgagacacacgatagtggaaatgaatccatatctttacacatcaagtttgcccttttcagacgggagtcgggtttcatttccgggattattgcagtcctccacgacatgacggaacaggataaggccgaacgcgagcgtcgactctttgtgtcgaacgttagccatgagcttcggacaccactaacgagcgtaaaagcctatttagaagcgctggaggacggtgctattgaggataaggaaaccgcttcgagctttattaatgtctcgctcaccgagacgaatcgaatgattcgcatgatatcagatctacttacgctttccagaatggatcaagaccgtattgtgctcaataaagaaatgattaatttgattgctttcctggattaccaaataaaccgtctcgaccaaattctggagacagaaagtaatgacttgatatcgtcgaacttcacccttgtaagaaaatattccgagcaacctatttgggttgaaattgacacggataaaattgctcaagttatcgataatatcatcgggaacgctattaagtactctccgaaaggaggaaccataacgattagcgtcgagaagagagagtctgacgttcttatatcgataagcgaccaagggatgggtattccaaaaagcgatcttctgaaaatattcgaccgattctatcgcgtagataatgcatctcgtaattctaaagtaggtggaaccggtctaggtttgtctatcgtccacgacatagtaaaaatccatggtggtacaatatttgcgtcttctgagggcgagggtaaaggaacgaccttcagtttcacattaccctatagcctggaggccgcagatgactgggatgacggcaccgacgaattcgaatttgaagacaacgaatga

SEQ ID NO: 3162 - DNA, 963 bp, Artificial Sequence
  Optimized genes for Lactococcus lactis
atgtccaaaaaaatagtcactctcgcgggagatggtatcggtccggaaatcatgtcggcgggtctaagcgtcctaaaagctgtttcgaaaaaaattgacttcgagtatgagttagaagcgaaagacttcggtggtatagcaattgataagcacggtcacccccttcccgaagaaacactccaggcagtaaagaatgctgacgccattttgcttgcggcgattggtcatccaaaatataataatgccaaagttcgtcccgagcaaggtctgctagctctcagaaaggagttgggtttgtatgctaacgtacgacctcttaagatctatccagctttgaaaaagttgtcgccaattagaaatgtggaaaatgtggacttcctgatgatccgtgaactgacgggtggaatctattttggacagcatgagctagccgatgacaaagcacgagacgtaaatgattactccgccgacgagattagaagaattttgcacttcgcgtttaagtccgcccaaagtaggccgcgcaaactcttgacatcagtcgacaaacaaaatgtcctagcgacgagtaagctctggaggaagatggctgacgagatcgccgacgagtatcccgatgtgcgcctagaacatcaacttgtagacagttgtgctatgctgttgatcaccaatccccaacaattcgatgtaatcgtgactgaaaatttgtttggcgatatactttctgatgaggcgagcagtttagcagggtcactcggagtaatgccctcgagttcacatggtttcaacgggcttgccctctatgagcctatccacggatcggcgccggacatagcgggcaaaggtatcgcgaacccggtatccatgatcttatctatagcaatgatgctacgcgagagctttggacaggaggatggggcaaccatgatcgagaaagctgttactcaaacctttaccgactga

SEQ ID NO: 3163 - DNA, 1383 bp, Artificial Sequence
  Optimized genes for Lactococcus lactis
atgtcgggtaagacgatcttcgacaaactttgggatcagcatgtaattgcggggaacgagggcgaaccgcagctactctacatcgatttacatgtgatccacgaggttacatctccccaagcctttcagggacttcgcgaagctggtcgtcgagtccgaagaaaagatttaacgtacggtacacttgaccataacgtaccgactcaagacatttttaacatacaagatctgatctcgaaaaaacagatagatacctttaccaaaaacgtaaaggaattcgatgttcctgctgaaactcatgggggtaagggtcaaggcatcgtacatatggtcgcacccgagtccggacgaacccagcctggtaagactattgtatgtggggattctcatacagcaactaacggggcgttcggtgcaattgcatttggaattggtacttccgaagttgagcacgttttggcgacacaaacaatttggcaagtcaagccgaagcggatgaaaatcgaattccagggtcacccacaaaagggaatttattcgaaggactttattcttgccctaatcgcgaagtatggcgtagacgcaggagtgggctatgctgtcgagtattcaggggatgcaatatccgatttgtccatggaagagcggatgactatctgtaacatgagtatcgagtttggggcgaaaatcgggttaatgaatccagatgaaaagacttatgattatgttaaggggcgagagcacgcgcctaagaattttgatgaagccgtttctaagtgggagaaacttgtctcggattcggacgctcagtacgataaaatactgtctctggatgtgagccaactcaagccgatggtaacctgggggaccaacccaggaatggggctggaattcggcgagaaattcccggagatcaataacgatctaaattacgagagggcatatcaatatatggatctcaagccaggacaaaccgcgtcagctatagatctgggttatatcttcataggctcgtgcacaaacgcaaggctaggggacttagaagaggccgccaagataattggtgacaggcacattgccgacggccttacaggaatcgtagttcctggttctagaccagttaaagaagccgctgaggctcagggtttagacaaaattttcaaagaagccggtttcgagtggcgggaaccaggatgtagcgcttgtcttggtatgaatcctgaccaaattccagaatacgtacactgtgcatccactagcaatcgcaatttcgaggggaggcaaggccacaacgcgaggactcatctatgtagtccggccatggcagcggcggcagcaatagcggggaagttcgttgacgttcggacgttagtaaccgactag

SEQ ID NO: 3164 - DNA, 576 bp, Artificial Sequence
  Optimized genes for Lactococcus lactis
atggagaagtttactatatataagggtaccagcgttcccgtcatgaatgacaacatcgataccgatcagatcatccctaaacagtttcttaaggcgatcgacaaaaaaggatttggtaaaaacttgttttacgagtggcgctatcttaaggattatgacgagaatcctgatttcatcctgaatgcacctaaatataagaaggcttcactcctaatatcaggagacaacttcggctcaggcagctccagggagcatgcggcatgggccttgagcgactatggcttccgggcaatcatcgcgggctcatactcagacattttttataataacgcactgaaaaatggtcttttaccaataaagcaacccagggaggtactgaaccagcttacgaagcttagctcgcaagaagaaataacgattgaccttccacaccagctgattattacgagtttaggagatttccattttgaaatcgaccctatatggaaggacaaattgatcaatggtctcgatgacataggtatcaccctccaatacgaggaagctattagcgcctacgaacagaaaaaccagtaa

SEQ ID NO: 3165 - DNA, 1158 bp, Artificial Sequence
  Optimized genes for Lactococcus lactis
atgaaaaaagccgtacactttggggcaggaaacatcggtcgcggattcattggggaaattctgagcaaaaacggcttcgacatacattttgttgatacaaataaatccatcatcgccgagttgaataatagacactcgtacgagataggtatagctagtagcgaacatgaaaaaatatcagtgaaagcagtgtctggcattaacaactccgagaatccagaagctgtgattgaagcaattgccaaggcggatatactaacgaccgccattggcccgaacgtactgccctacatcgcggaattgatagccaaggggctgcaaaaacgaaaagaggaaaaagttcaaagtccgttagatataatagcttgcgagaatatgattggtgggagtgaattcttggaagaaaaagtctcggactacctgtccgagtccgataagttgtatttaagtaaatttataggctttcctaatgctgcggtagaccgtattgttccggctcaaaagcacaaagatgttttatatgtggaggtagaaccgtttagcgaatgggttattgatgcgtcacatctgaaaaacaaggaaattaagctggaaggcgtccactacacaaccgatctagagccgttcatagaacgtaagctatttagcgtcaattccggtcacgcggcggtcgcttattcatctgcttacaagggatataagacaatattagagggactccaggatgaggagatcttaaacatcctcaaggccgtacaaaaagagacacgggcactcctattggctaaatgggcgcaatattttaaacaggacgagcttatcaaataccacgaattaattatttcccgattcagtaaccctgagataatagatgaagtaagcagggtggcaagaactcccattagaaagcttggctatgacgagaggttcatccgacccattcgcgagctgaatgatcgaaagctatcttaccaaaaccacttggatatagttggaaaaatctttgcatatcacgatgaaaatgatgctcaagcgattcaacttcaagagaaactaaagatcaccgaactaccaatgctgatagaggaggtcaccggtctctccaaccagaaattaattttggagatagaaaaggtcattaatcactacaaaaagtag

SEQ ID NO: 3166 - DNA, 942 bp, Artificial Sequence
  Optimized genes for Lactococcus lactis
atgattgaaaagtacaagaacattcttatcacctttattgcgctcgcagcgatagtttttcttgtaggatgctctaataagaaaacagatcaggtcacagacaaaaagatcaatgttgttgttaccaatagtatattagctgacataacaaagaatattgctgatgacaagattaatttacatagcattgtacctgtcggaaaggatccccatgagtacgaacctttgcctgtcgacgttcaaaaaacaagcaaagcagacttgattttttacaatgggttaaatctggaaaccggtggcaatgcctggttcacaaaactagtaaacaatgctaataagaaggaaaacatagattattttcctgtgtcgacgggtgtggaagttatttatctggagggcaaaaatacagagggcaaggaggacccacacgcatggttgaacctcgagaatgggataatttacgcgaaaaatatagagcaacagctatcgaaaaaagatcctgttaataaggacttctacaagcacaaccttgacaaatatgtgaagaagttgtccgatctagaccagcaggccaaaagtaagttctcgcttatacccgaaaacgagaaaatgatcgtcacatcggaaggttgttttaaatacttctccaaagcctacaatattccgtcggcgtatatctgggagattaatactgaagaagaagggactcctgaccagatcaagaatttggtacgaaagctgcgagcgactgagctgaaatccttattcgtggaatcttcggttgacaatcgcccgatgaagactgtttcaaaggatactggcattcccatttattcgacaatctttactgacagtgtagcaaaaaaaggggaaaacggagactcgtattactcaatgatgaagtggaatttggaccaaatttacaaaggtttagcaaaatga

SEQ ID NO: 3167 - DNA, 1314 bp, Artificial Sequence
  Optimized genes for Lactococcus lactis
atgtctttgttcctcgacaccgccagaattgaggtgaaggcaggcaaaggaggagatggggcagttgcttttagaagagagaaatatgtaccagacggaggcccagctggaggggacggcggcaaaggaggttctgttatattcaaggtcgacgagggaatgtccacactcatggatttccgatataataggatctttcggggcaaaccaggagaaaaggggatgaataaaggcatgcatggtaggggagcagaagacttaattgtgcatgttccccagggaaccacagtcaaggataatgaaactggtgatgtgctggtggatcttattgaaaaagatcaagagtttgcagttgcaaaaggcggccgtggtgggcggggaaatatccgctttgccaccccgcggaatcccgcgccggaggttgcggagaatggtgagcctggagaggataaaatccttctcttggaacttcgagtgctagcggatgtagggttagtgggttttccgtcagttggcaaaagtaccttgttgtcagtcgtgagtaacgcaagacctaagatcggggcgtaccattttacgacgattacaccgaacatcgggatggtgcaagtcggttatggggattcatttgtcatggctgacatgccaggtctgattgagggggcccattccggggcggggcttggtattcagtttttgcgtcacatagaacggacgcgagtactgcttcacgttctggacatgtcggagctggagggacgggacccctatgaggattataaaactataaacgatgagctcgaatcgtataatctccgacttatggagaggcctcaaataattgtcgcaaacaaaatggatatgccagaagctgcagaacgactggcagaatttaaagagaaattggcagcggacctcggccccgacaaggagatgcccgagattttcgaagtaagcggcctaacaaagactgggctccagggtctactggctagaacatcggagctcctagcccaaactcctgaattcctgctatacgatgaggatgagttagctgatgagacagcatactacgggttcgaagaggaagaaaaaccatttaaggtatcccgcgatgatgacggtggttggcggctctctggcgacaaaatagagagactctttataatgacgaactttgaccacgacgagagtgtcatgaagtttgccagacaaatgagagcgatgggtgtggacgaaacgttacggtccatgggggccaaagacggcgactacgttcgaatacaaaagttcgagttcgagtttgtcgactga

SEQ ID NO: 3168 - DNA, 960 bp, Artificial Sequence
  Optimized genes for Lactococcus lactis
atgtggaaagtcataatccgtcgtattcttctgatgattcctcagttattcatactgtcaatacttgtattcttctttgccaagttaatgccgggtgatccgtttagtggattgatcggacctcacacggatccccatgaagtggaagcacttagaagggcggcgggcctttacgatccctggtgggaacaatatttgcgctggcttggcaacgctattcatgggaatcttggaatgtcttataatcttaaagaaccagtcatgacagtcattggccaccgcgccattaacaccttctggatgagtctcttgtctgtcattctaacatacttgttcgctatccccatgagcattgttgccgcacgtaacgaaggtaagtggcaagaccagttatggctgacgtataattccattacttttggtatccccccttatgtgttttatctgctgatcatatttattttcggttatagtttgaactggtttccaaccgggggtaccgtatctccagatgcaatgggtattatccccgtattctttagtaagatatatcacatgattttgccggccttctctttggcagtgtttggcaccgtcggcatcttcacatactttcggagtgggatactcgatgagcaaacccaggactatgtacgaacagctagggcaaagggcgtaaaggaaaaagtcatttttcggcgccatatcttaagaaacgcttcactaccgatagcatcgaactttggattcgtgatcaccgggctgcttggcggtgcgatctttgcagaaaccatcttcggttatcctggcttaggtcaactttttatcacctccatcagcggacgtgattactccatgattacagctttgatacttctcaatggatttctaggactcttgggcgcattattgtccgatattataatggctatggtagacccacggatacgcattcagtga

SEQ ID NO: 3169 - DNA, 1638 bp, Artificial Sequence
  Optimized genes for Lactococcus lactis
atgaaaacttggaaaaaagtaactctggggactgtggcattaggatccgccgcgttgttggctgcctgcggtaatagcggatcgtcttcgagttcctcgtcgaaagatatccaatggaatctgacttcccctattcagactctggattcctccctagccaccgacacatactctaacatcataataggtaacacaaacgctggcttgacacgtgttgataaggatggaaaggcacagcccgagcttgctaagagtgtggacgtaagcaaggacggtctgacgtatacgtttcatttacgagacgggctcaaatggtcaaacggggatgcattaaccgcaaaagatttcgtctatagctggcagcgcgcggtcgacccggccactgcatcggagtatggttacttactggggccggtcaaaaatgccaatgagatcaacggaggcaaggctgacaaatctaccttaggggttaaggcaacagacgataagacttttgttgtgacacttgcccaacccactccgtattttgaattcctgaccgctaactccgtttactatccactgaatcagaaggtagtggaaaagtacggaaaacagtacggaacctcctcggaaaaaatggtatactctggaccttataagttcgagaagagtaagggatggaatgggagcaatcagactttctcgatcgtgaaaaacgacgattattgggataagtcagcagtgaaaacgaaggagattgactttcaagtagtgcaagacccaaaaactagtttcaacctgtacaagcagggaaagattgtccaggctagcatcggagatccagacttatttaaggctaacaaaaacaataaggacgtggtcagcttggacgaagcaactaccgcgtatattcaatacaaccaatcgggtaaaaataaggcgttagccaacaaaaatattagggaggcatttaatcttgctacggatcgacagcaatatgtggatactgttacgccagcaagcaaccctgccaccggactgacaccagcaggaatggccaaaaccaatactggtgttgacttcgcaaagtatgcggcacaaccctataaatacgatgccaccgcggccaaagctgcatgggcgaaaggtttatcagagatcggggagacaaagttaaccctcactctgactacggacgataccagtgctagtaaagactcggcgacttttttgaaacaagcctgggaaaagcaattacccgggttgacgttaaatatcaagagtgttccattcaagcaaaggttgaatgattcaaccacaggtaatttcgacatggttatttcgctctggggaggggattacgcagaaccctccacgttcctggatctgttcgtgaaagacggtccgaacaacaatggtaaaatcaacaatgtcacgtacgataaagccattaaggcagctgaggtcacggatgccctggacccagagaagcactacgcagactacaaggccgccgaagagtcattatacaccgagagtaacctaaatccgttatactttcggacgacccccgtgctgcgcaaccctaacctcaaagatgtgcgttttgggagcacaggtcttatgtatgattttaaaacggcatacctaaaataa

SEQ ID NO: 3170 - DNA, 1050 bp, Artificial Sequence
  Optimized genes for Lactococcus lactis
atggctgaggaaaaggtgctggaggtaaagaatcttcatgttaattttcatacctatgcaggggacgtcaaagcgataagagatgtcagtttcgaccttgaaaaaggtcaaacactggcgatagtcggtgaaagcggtagtggcaaatcggtgactaccaaaacccttatggggcttaacgcaaagaacgcagttattccccagggagaactacttttcaagggcagaaatcttctggatctgaaagaggaggagtggcaaaaaatacgaggaaatgagatatccatgatatttcaggacccaatgacatcgctcgacccgacgatgagaattggaaagcagatcgccgaacccttgttaaagcacaataaaggcatgtcgaaagctgatgctatgaaaagagccttagagctcatgcaacaagtaggcattccggatgctgaagtgcatatcaatgactacccgcatcaatggtcgggggggatgcgtcaacgtgctgtgattgccatagctctcgctgctgatccagaaattctaatagctgatgagcctacgaccgcactggacgtaacgattcaagcacaaataatgcatatgatggcagaactgcaggagcgtataaactcctcaatagtgtttattacacatgacttgggtgtggtggctggatttgcacacaaggtggctgtaatgtatgctggtgagatagttgagtatggcacagttgaagaaattttttacaatcctcaacacccctatacatggggcctgctagatagcatgcccacagttgactcctccgtcgaccgtcttgttagcattcccggcacccctcctgatctgctcaatccgccgaaaggtgatgcttttgcggcgcgtaataaatttgccctagctatagactttgaagaagagccgccatactttgaagtttctcctacacatttcgcaaaaacctggttactggacccgcgggcccctaaggtgaccccaagtgataacatactcgctagatggaaaagatgggaggagttaaaaggtgacaagtaa

SEQ ID NO: 3171 - DNA, 1887 bp, Artificial Sequence
  Optimized genes for Lactococcus lactis
atgaaagagtttattatcaaaaacactgatatatggaaaatctttctcaaatattatagatccgacgaagaaatagtttttctacacagcagtcaggtcacggaaaatgaacactatagcatcctggctcacaagccttataaaaaggtatccaaatacaaaggccaagtttttttcaatggggagaagaagaagttcaattttctagacgcagtcgatttactgaaagacgagcgagttgagcgtcctaaaaattggcctttttatcccgaactcctgggattcgtgtcctacgaacaagatccggcatgctttgcagcatacgacgaggtcttactttttgaccacagaacaaaacttctgcgggtggtacagttcgagcaaaccgacggccaatactggttaacggagtcagaggagatcgaagttgactcggagatagagttcgatggtcagaatggtatcggggcaatctttattgatcaaacgagacaagaatacattgcatctataaagaaactacaagattatatgaaagccggggatatatatgttgcaaatctaacgcaacaattcgagatttggtctgatcaaaaacccatagaagtgttcaagaaaaccaggaagcagatccctgcgcctttctcatcattcttgcagtaccctgaatggaaaatgacccaaatttcttcaagcgtagagagattcgtatcaatacacgacggcgcactgatttcgaagcccataaagggcaccatcgcccgcggggaagacgtcggagcagaccgcctccagaaggaaattttgagtgatagctccaaagaacgaagtgagttattaatggtaacagacctacttcgtaacgatattgttagaattagtcaacccttctcgctaagcgtccccaaattcgcagagatagaaaccttctcgcatgtacatcagctagtcactagcatcaaatcccggataaaggaagaccttacgttctccgaattcatgacagcgttatttcccggaggctctatcacgggtactccaaagaagcgtgctatggaaatcataaaggaggtcgagaagcagcctcggggaatttacacggggatgcaagggtggctgtctcgtgaaatggacctcgatatgaacatagtgattcgcaccctagttcacgacggagagcactatcaactaggtgtgggcgggggtatcacctttgagtccaaagctgaggcagaatttagcgaaatccttttgaaagccaaacccttcttggacatcttaggtgtaaaggatgttccgagtattttattcacaaccggaataataaaaaacggtgaactactaaatctggaggggcacgttaacaggctgaaaaagcagtaccaccaccctgacctagaggagaaactccgtattttcgcacaaaacgttaccgatggtgtactcagaatatccactgacggggactcgctctcgccgggaataagacagctaactcattccaacgaagcctatagggtaaaattatccagtataaacgacaagccaagcttgctctcaaatttcaaactctcaggtcctgatttccaaaaggtgttcagacaggaggtgttagaagcaaaaaaggaaggatttcaggatatactgtttcacacagatgggctcatatcggaactgtcgattggtaactttgtggcaaaaaaaggtaatcagtatgagacccccgcgaaatacgccttaaagggtacttttctggatcttttcgccaagaatcataccctaatatataaagatatagctcttagcgatttgaaaacctatgattgtttttatatgactaacgcggttcgggggctagtggagataaagatcgatggaatttcatag

SEQ ID NO: 3172 - DNA, 2757 bp, Artificial Sequence
  Optimized genes for Lactococcus lactis
atgaaattctaccagaaatcaaaagaagaactgctacattcctacgatgtaaagatcgaccgcggactttccagcactcaagttaccgataatcgagaacgctacggagagaataagttacctgaggaaaaagaggaatcttacttaaaagtattttttaagagttttaaggagccgatcataatcgtcctactgggcgctgtggcgttaagcttcttctcatcattctactcgttccaaatagtcggggacaagaaacacggactagaaagcttatatgaggcgatcgcgatcgccatactcatcatcataaacgcttttttaggcttctggcaggaaatctctgcgcggaaaaatttgaattccctcaaagaaatgaataaccgtttcgcaagtgttttgcgtgatggtgccctagagaaaataagctcgaacgagctcgtcgtcggagatatcgtaaaggtcaccgttggtgactttgtcgaggcggatatccggtggctcgagctggacgaacttcaacttatcgagtcgcacttgaccggcgaagctgacgcgattatcaagaacatcgaggtgatcaacgagaacgtagaaattggggatcaaaccaacatgggcttcagtggttcaattgtatcgaacggccagggaatcggcatcgttgtggcgacaggtgaaaatacagaactaggcaagatttcacaactcatgaaggatgaaggcataaagagctcaccccttcaagagacagttaaaaaactcactaagacactaatgaagatctcagctggcatagtgctactaacgtttgtgttcggattgatttcgtccggtgaattctcaatcaactcgatcaccagtgtcttctccacctcaattgcactcgccgttgcatctatccccgacgctcttcctgttgtgctatccatagttctgactatcggagctgtgaagatgtctaaaaacaaggggctcatcaagactctgtcttcagtcgagacactaggatccacttcatacatttgctccgacaaaaccggcactttaacccagaatgagatgacggtcacgaagttttatgctaacggacagttatataacgtagacggcctaggatactcaagtatcggcgagattcacctgatagcgaaaggggaaaagaatataaattttgcacagtttatgaagaatatagttctctgcaatgattctagtgttaaagaggtggaaggtcaagttaaaacattcgggaatcccacagaagtagctctcactgttttaggctccaaagccggctatagtaaaaacaaattgctcaaaaataataaaataattagaacgttaccgttcagctcctctcgtaaaatgatgagtgtaattgtgcagaacgacgagggattttacgtatatacgaaaggggcacctgacgtcttgatggagaaggcctccggtatactcattggcgacatagtcgatcaaagtgaacagagcaaggataacttcataaaggtagtggacgactacgccgatgaagctctccggactctggctgtagcttataaaaaagtagacgaggaggaagcgctatatggagcaactgaggatgtggagaaggatttcatcctcactggcgtggctggtattattgaccctccacgggaggaagttaaggagtcaattcgtcagctgcacgatgcaaacataaacgtggtcatgataaccggtgaccatgaaaaaactgctcgcgcgatcgcgtatgacttggggatagtaaaagaaaaaaatgcgactgtcttaaaaggcatagaccttgaggaaatgtctgatcaaaagctttacgctgaagtgaagaatgtaaacgtatatgcacgtgtaactcccgaacacaaacaaagaatcgtaaaacaattacaaaatcatcagcaagttgtcgctatgacgggtgacggggttaacgacgctcctgcgctcagagccgcggatataggtgtcgctatgggaatcacgggtaccgaggtaactaaggattctgcagacttaatcctcctagatgataaatttactacgattgagaaatctgtatactcaggccgcaccatctatgcgaacataaagaacttcatgcggcatgagcttactactaacgtggcagaggtgctggctctagtgctaggtctggttttgtttcgcagtagtgttgggaatgtcgctgccatgacaccgacactaacggcactaatggtcctgtgggtgaacatggtctccgacgcgataccaagcttctcgctcggttacgacgttgctgagactgatctaatgaaagagaagcctcgaaaccctaacgagtccatcttagcgaatcacacatggagtcgggtcttgatccgcggaacagttatgggtacaatggtctatctcggcttcctgcttgcggcgcagaatggtctcaacgcctcggaggcccaaacggtagcgttcctaacactagtatacgggcagctatggcacgtttttgatgcaagatcgtccagaactctattccggaggaatccttttggtaacatccgtctagtcggagcagttctgttcgcgggtgtttcatcgtttttggtgactataattccgttttttaacagcgtgatggggacagcgcaactaacgcttccggtgtatctccttgtcatttttatcccagcactccctacattgattctttctgggatcaaggaggtatttaagataaaaatctggtaa

SEQ ID NO: 3173 - DNA, 1242 bp, Artificial Sequence
  Optimized genes for Lactococcus lactis
atgaagtacgaaaaactgctcccccgtttccttgaatatgtcaaggttaacacacgaagcgacgagaactcgacaacaaccccaagtacgcaagctctggtggagttcgctcataaaatgggcgaagacatgaaagcgcttggattgaaagacgttcactacttggaatcaaatggttatgttatcggtaccatacccgctaatacggacaaaaaggtccgtaagatagggctactggcgcacctagataccgccgatttcaatgctgaaggtgtaaacccacaaatcctagaaaattacgacggtgagtcggtgattaagttgggcgataccgaatttacccttgaccctaaggattttccgaaccttaaaaactacaaaggccaaacacttgttcacacggacggaacaacattgctaggatccgatgataaatcgggggtggcagagatcatgacattagcagattatctcttgaatataaatccagattttgagcatggagaaattcgcgttggctttggtccagacgaagaaatcggcgtaggagcggacaaattcgatgtagccgacttcgatgtggattttgcatacacagtagacggaggaccactaggggagctgcagtacgaaacgttctctgctgccggtgctgtcatcgaattccagggaaagaatgtccatccaggtactgcaaaaaatactatggtcaatgccttgcaactagctattgactaccacaatgcgctaccggagtttgataggccggagaagaccgaaggccgcgaggggttcttccatctgctaaaacttgatgggaccccggaggaggccagagcccagtatattattcgggatcacgaggagggcaagtttaatgaaaggaaggccttaatgcaggaaatagcggacaagatgaacgctgaactaggacaaaatcgggtgaagccggtcatcaaagaccaatactataatatggcgcagattattgaaaaagatatgtcgataatcgatatcgcaaagaaggccatggagaacctcgacatagtacctatcattgagccgattcggggaggtacagatggttcgaagattagcttcatgggattgcccactccaaatctctttgcgggaggtgaaaatatgcacggccgctttgagtttgttagtgttcagacgatggagaaagcagtggatactttactagagattattaggttgaacaacgaggtagtaaaataa

SEQ ID NO: 3174 - DNA, 477 bp, Artificial Sequence
  Optimized genes for Lactococcus lactis
atgcgtttgttcctctttcttatagcctggctgcgctgcctgcagcttttagatctagaaaaacaggtcaagttcgagtttaatttcttgcgaaaggagatgatcaatgaaaacgataataaaggtaccacatacgggagtcgtatcgcggcgaacaatactaagcaacgactccgacgtattgcctgccgaactgcgcatgagtggcttgaccagtccgaagaagtttttgagcaattccatgaaaagcatcggtgcgatgtttttgtcgtcatttacccgcccaagcgtttcaaatacgatcctcctaattacgagccgacttctaaagctttgatagatggtcttacagacgctggcatctggaatgatgacaactataatgttattcgccggacatctttcgaacatgggggcctaagcggtgacacgaaaacatggaaagtggaactagttgtgaaagagctgactgaataa

SEQ ID NO: 3175 - DNA, 363 bp, Artificial Sequence
  Optimized genes for Lactococcus lactis
atggcgcgtttagaaaaaatctacgacgtctactttaacggcataaaaatgggtacaggtacgaagaaagaactatctaagatgctacttgtttctcctcactcagtggctggatgggtgaagaacggcatggcaaactctcctaaaaacaatgccgtgaaaatagcggtagtgaatgagaaagctatgatggagaaatatccagggtggaagccttacggtgggtccaaatctaagatcagtgatgaaattacagaccgtgatcggcggaagcacgaaaccaaagaagagcggcgtcttcggcgcaacatccgtgcccaaatggctatcgaggcagccaggaaagaggagctgggactctaa

SEQ ID NO: 3176 - DNA, 210 bp, Artificial Sequence
  Optimized genes for Lactococcus lactis
atgagttatgtcgtgaacaagaccggcgactttagcggctaccatgaggtccacaagggagcttgtccaaacagaccaattgtaacggatagctatttaatcaacaagcaattcgagaacgatttagatgccatggaatatgtgaaagaaatataccctagccttcaagttcggccatgtctgagctgtatggatacgtcttcccgataa

SEQ ID NO: 3177 - DNA, 399 bp, Artificial Sequence
  Optimized genes for Lactococcus lactis
atgaaaaagataaagaacattgcgatatcgaccgtactcggggcctccgctctaataggtctgtccgcgtgtagtcaagcggacaaggtaagtcaaaatgtttcaaatgacgcggacaatttcaaagtcgaacggcgggtggttattataaatacacgtacggataaaatagaatttgttgccaaaggcctcatttccgtaaatacggaagacagtaagaaactcgtgattttggcgaaagtgggcaagtcacaatataagaaagatataattaacttaactaataataatatgtacacggttgaggacctatccggagcaaacgttaacagctataaatacgaagtgacttggttaccagagagcgttgtgccggtaaaaatagtaggagagaaataa

SEQ ID NO: 3178 - DNA, 1080 bp, Artificial Sequence
  Optimized genes for Lactococcus lactis
atgagtattctgaatccttttgagaggaggtccagcatcacaccgaacaattattatccttttatggttcaaaatggttctatcgttcccaactctctagtcgacgcaaccgaggcactcaaaaacagcgacctttacgcagtaacttcgctcatttctagcgacatcgctggtactcggttcattgggaaccaggttttcaccagtgtcctcaacaacccctcccacttgacaaacgcgttttcgttctggcagactgccatcctgaatctgcttttgaacggtaacgtgttccttgctatcttgaaaggagacaactcgcttatgaaagagctgagacttattccttcaaacgctattacgattgacctgacagatgacaccttgacatacgaggttaatcaattcgacgactacccgtcggctaaatataacgcgtccgagatgatacacgtcaagattatggcatacggtgttgacacgctccataatcttgtcggacatagtcctttggagagcctcacgtctgagataggtcaacaaaaagaggcgaatcgtttgtcgctttcaactcttaagggagcactcaatcctaccagtgttgtcaaagtgccccagggaacgttaagctccgaggcaaaagactctataaggaaggagttcgaaaaagccaatggtggaaacaactctggtcgtgtgatggtattagatcagtcagcagactttagtaccgttagtattaacgccgatgttgctaactatcttaacagtatgaactggggtcggacgcaaattgcgaaggctttcggagtctctgactcttatttaaacggtacgggcgaccaacaatcttctttggatcaaattaaggatttgtatgtcaacgctcttaatcgttttatcgaacccctcataagcgagttgagaatcaaatgcgatagctcgattggcgttgatatgtctcctattacggattactctaacagcgtctttaaggctgacattctcaattgggtgaaggaaggtataatcgagcctactgaagccaagacgctcctggagagcaaggggatcatttga

SEQ ID NO: 3179 - DNA, 570 bp, Artificial Sequence
  Optimized genes for Lactococcus lactis
atggtggttaaagtttttgatgcttatattgaaggagaaaagaaggccactgggacgattgatgagatcgccgactatttcgatatctcaaggacttctatttctctatggattaagaacggaaaggatccaaaaaaagcaaaccccaaatataaacacgctattttaaataaagaaaagactaaagaacttactgaacagaaaaaaaaggaagaacgaaagcttccagcatccgtgtacgactattatgataaaggcgagttcatcattactgggaccgctcgcgaaatttcccaatttcttaagattggaaagcataatgtttactcctatatccaagtcgggaagtatgcgtttgattaccgcaagacacggaagcatgcaattttgaacgaagctgaaactcgcaagagatttcctttgctatccgtctcctctgaagaggaactcattgagacaaaagaaaaagagcgtcgtaagcacgaaacaaaggaagaacgcaggcttagacgaaatatccgtgcccagatggctattgaggctgctaggaaggaagagttaggactttga

SEQ ID NO: 3180 - DNA, 1206 bp, Artificial Sequence
  Optimized genes for Lactococcus lactis
atgaagttttttaacaataagagatcacccaccgaagagtccaaagctaaagacgagatccctaaagcccctcaggttgtcatgactcttccaaattttttcaaagaactcataagcgacggatatactaaactaagcgatagcccggaagtccgtatggcagtagactgcatagcagatctggtatcaaatatgactatacaattgatgcaaaacggcgaaaccggagacaagcggataaagaatgatttgagccgagtggtagacattgaacccaacaaatatttatcacgaaagaccttcatccaatggttagtgaggtcaatgctccttgaggggaatgggaatgctgtcgtcaaaccgcaggtctccggcgacaaaattatcgggcttacacctatcagtccatataaagtgacatttaatgtgtcggacgatgaccttgactactctataacttttgataataaagagtacgaccctagcaccttgctgcattttgtgttaaatccatcgatagagcgtccgttcataggcacggggtacaaagtcgctttaaaggatatcgtaggcaatcttaagcaggctagtgtaacgaaaaagggttttatggcctcggagtatatgcctaatctcatcgtatccgttgactcagactcggacgaattgagcgacgaggaaggcagagaaaatttcgaagagatgtatctcaagcgcaaagaggccggaaaaccatggataattcctgaagggatggtgaacgtccaacagatcaaacctttgacgcttaatgatcttgcgattaatgacgcggtcacactcgacaagaaaacagtggcggggatttttggggtgccggcgtttctgctgggggtgggtacttataacaaagatgagttcaataactttataaatactaaaataatgtccatagcgcaagtaatccagcaaacttacaacaaattaatagttgaggaagatatgtactttagtttgaacccacgctccttatataattactctctgacggagatggtatcagccggggctcagatgactcagttaaacgccttacgtcgcaacgagttcaggaattgggttggaatgccgcccgatgcagagatggacgatctcctggtccttgaaaactatctgcaacagaaagacttggtgaaccaaaagaagcttatacaggatgagacctga

SEQ ID NO: 3181 - DNA, 372 bp, Artificial Sequence
  Optimized genes for Lactococcus lactis
atggcgaacaaaattagtatcgatgatcttgctaaaacgatcgagagcgaagtacgtaactggacgaaggatgtggtagacgacattgacgatataaagaaggatatcactaagaacggggtcaagcaactccgggaaagctcgccgaaaaggactggtgactacgccaaaaattggacttctcaaaaacttaaaaacggtgaccaggtaatttaccagaaggcccccacctaccggctcacgcatcttttggaaaacggtcatgccaaaagaaacggaggtcgggttagcccaaaagttcatatagcccccgtcgaagaggaactcgttagtaactacatcagccgagtggagaagaggttaagccagtaa

SEQ ID NO: 3182 - DNA, 1602 bp, Artificial Sequence
  Optimized genes for Lactococcus lactis
atgaccgaacactttataaccttaagtaccactgaaccgaataataacgtggggatcgtgaagttacgtcacgctgatgtcaattcacaagcgatagtcgcccaaatcgtagagaacggccaaccgaaaaattttgagggtctccagccatttttctgtttgatggcacaggagataacggggcaaggcgtctccgaggagagtgttgtcagttttgatgctaaaaacggcacgctcaaatatatagcttctgacaacgccttacaaatggttgggcgaaacgaagcttatttttcatttcgcaagcaagaagacggcaagtggatcgagcagtttagcactcgcacgtttaattacatagtggagaagtctatatattcccagcccttcaaagatagtaactactggtggacgttcaaagagctttatagaatatttaacaaatacattgaagacgggaagaatagctgggaggaattcgtcaaccaaaataaagagatcctcgagagcgtggatcccgggggtaaaattctttctgagcttctagccgccaggaatggtaagccaaatctcaagactcgcattgacgacctagagaataaaacgactgcacagctagcggagaaggtggatataagcgccacgaacaaatttaaggggtactttggaactaatttcgatatgcagatgagcaaagattgggatcagacatatcctataagcaagtttgttactgagattcagcagctgaaaccgtatcaacttgatggcgtttttatcacggttgaaatacaacccctacgagagcagagattggcctttgaggcaaacactttaacgaccaacgatcttcaattcacgacgcttcctgacctcaccagtctagctcagttagtgaatttgtgcgagactgaatctattccaatcatgggtttgaagattcataacaattggtcgaatacgcaatgggccaagttcgacaagaccatttggttttccaagtaccgggccactatagaccaaataatagcgatcgccccgacggagaagatcggggtcctaaacgagtcggatacaatctggcgggacagcgcatcggaggctaacatcattgacctgatgaattaccttaaaggtaccggaaagaaagttacattagagggttcctggtcccctttaacgttatcaaagccactgcaaaacgcaatggactacttcgctattcatgcgtatcccagcctgtcgtctaagcgggaacggaccacttttagcgattgtctgatgggttggtcggtgagcaacatgatcgacaatttacggaagattaaattcacatatccggacaaagaaatatggataaccgaaacaggagtgcagaatctatgggaggcactgagggcccccgaggactactacacaccagaagacaacactccgtctgcagacaatttagtacagactttgtattttgattcgatgttccagtacttcggatcggacgaactagtcagcggcgtattcatgtggtattttgattcgaattactcactcctgtttgaaaagatgctaaggaaatatagagaggggacatttcatgcttaa

SEQ ID NO: 3183 - DNA, 831 bp, Artificial Sequence
  Optimized genes for Lactococcus lactis
atgttgaataactatgtgaagatcaacggcgatattgactgggtgaatattgattatgccacccacgcagcggcactgttcagagttcgcctagacgagaaaaaagcattctacacattcctcggctcgaaaggtgtagtcgtggttcgcctcctacgtacttcgagttatgagaactactacaatgacatcatgatcagattcagcagtctcgacccaaccactaagacaccaaacatttcagtctacgatctcaataaggacaaaatgtttgggtacacgtatgctatcaaggttatgagtgatggatacgcatatttttacgttaagggttcaaacaaatacgattcatttaagtatcaactggtctatgcatcgaatccttcgtacatcgaagcgctagggacttctgcggatgtaatcactgtcgcggactttgatagctcaacaaatgcggtagcttattacaagccttcgtcacaaacgtttaatgtcccgaccattacgatgggctatgggcaaaatagcacggatattaaaacacagcctctcactgcgattaaccacggcaattatattcaattagtggggtatatattagtgtggtcaggcctaaccaaccaaacagtattcaccgttaattcttccaaacccaatcgcgcacatacttttttcgttgatgtaatgggaagcgctgatattagcaatacagctggcaccctgcgagtccctatgaccatagagaaagacggcacggcatctataaatcttggaactactatctcaactacgcggctgatctacatagacaccacatacagatttctgtag

SEQ ID NO: 3184 - DNA, 171 bp, Artificial Sequence
  Optimized genes for Lactococcus lactis
atgctctactacaaatgtttgcgcctggttagtcgccgacgcttcggatcgctcgctcagctcgaagcgaatcgctcggttgcggggtcgagtccggcaagaactataaacaaatggcgggttaagaaacgaggggggaacctcgctaacagcttcataattatgttctag

SEQ ID NO: 3185 - DNA, 396 bp, Artificial Sequence
  Optimized genes for Lactococcus lactis
atgaagcgaccagtggaaatagttcaagatatcatagcggcatcagatttcccccacgatgagattttcttggatagcatcccgtcggaaaagctggatagctctaacgaaacacaagtacttctaaccgaatctgacaatggcccatcggactatgggaactccgatttcataagcctaatgtatggagtctatattcaaatattttattccaatgctgaagattcagggatcaacatcgtgcaatcggagatcaacctcatgaaatcttttataaacaatgactggttgattgcgcagtcaaagtcgcactatatcgatcccgacacggggcagattatcaaaaacttaacggtccaacgaattatgacgttatccgaaatagcgaatagttag

SEQ ID NO: 3186 - DNA, 507 bp, Artificial Sequence
  Optimized genes for Lactococcus lactis
atggtgtcattctacgacgcaatgcagctgattgtggaccgagcagaggagctgtcgaccaagatgagcgtggaagataaagcagaagttacaaaagctggtgccaaggtttttgaacaagcgctagcgtatgaagtacggaaccgacactaccgtcaccgtgacaccggggaggatccccaccttgccgactccatcgtaatgaagaataaaaacatcgatggggtcaaggacgggcagtccgtggtaggttgggagaggtcgacggaaaaagggacccatacgaaaggctacattgccaatattattaacaatggaagccggtttccgcaattcacgacgcggagcggacgcaagtataaaaaaccaggggaagttgcggttcacgccgatcacttcattgaagagaccagaaaaaacccaatagtgcagcagggaatactgaaggccgaggcagaagcaatgcgaaagatcatcaatcggaagaaaaaagagtcgaatctttag

SEQ ID NO: 3187 - DNA, 423 bp, Artificial Sequence
  Optimized genes for Lactococcus lactis
atggccgacaagctggaccgcatcattggggactatgtgaacggtcgtttggaagcacggatcaagtctatagagtcaaggtatctatacaagcaaaaagttgataaccttggaaatcgcacggcgtacagcggaggcagtgaacaattgtcccatgtattgaataaagaggccttggagaacgacgaagagtatatcaaactcaaagatttgatgtaccaattctccttgtggtatgaaccactcataaaggaagaaaaagaaataatcaagcttaaacattgtgggtacgggggattcacctggtatcgggtcatgatggaactcgacaacgaaggtatagaaatttccgaaaagaaagcaaagtttatctactatcgttttcgaaaagatataaatccacatataggctacttcatttag

SEQ ID NO: 3188 - DNA, 360 bp, Artificial Sequence
  Optimized genes for Lactococcus lactis
atgataaccgcgattgcacaaattatgacatcgatatctataataattcttctagtacttatcgtcttcacgaacaagcgcctggctcagctagaagtgaaaatcgaacggtgtcgggacctctacaatggaattgatctcgttcctctacgagtcaaaatcaattatctagaaggatccataaaggcgctttataaatataaggttctcttcaaacggggttggtggagtagagagggggagctgcaagaggaatattttttcacaaagaagcaggctgataagttcatcgatagtaataatctgaaagaggtcgtcataatacgcttagaggacaatgaaactgagatcgtgaagtga

SEQ ID NO: 3189 - DNA, 360 bp, Artificial Sequence
  Optimized genes for Lactococcus lactis
atgacgaatctgtatgacgaaactgtcactattttagaatcgcacgataagaccattgctgatatcgagtacataggaagcagtgagaccaaaattaacaccaataaagcgctcgaacttatgaagaaaaccaattaccacagtggatatgggggacaggaaatagcggagaaccttatgatcaaaggcaatggctttataatgacacgaggagaatatgacgggtcagagtggtgggattacatgcagacggatccctctctcccgcaagtcgaacgagaagttaaatccttcaaagccaacataggttgggaaagcttggaagaaatcaacggtttggaagacactaaaaatgactga

SEQ ID NO: 3190 - DNA, 927 bp, Artificial Sequence
  Optimized genes for Lactococcus lactis
atgaagttcaaaaaactggggttagtgatgactacagtctttgccggcgccgcccttgtaacactgtcgggttgttccagttcggacagcgcgtccaaagatattataacgatgaagggcgatacgattcgagtgtcagatttatacaaagaggccaagcagttcccatctcaaccgacgaacactctgttgcaaaatctcactttcgataagatatttacgaaggacttcggaaaggaagtgaccgataaagatgtttcaaagaaagtgaaatctataaaagaccaatacggctctcagttctcgtcggccctacagcagcaggggttgaccgaagcgagtttcaccccttatatgcgaacccagatgctcgaacaggccgcgatagaccatgaaataaaagagacgcagtataccgacgccaacctcaagaaagcatgggaatcctaccaccctgatgttacagcctacgtagtcagtgaaactagtaaagatgctgccaccaaagcgttagatgcggcgaagaaggacgacgcaggtaaggcttcctttgaaaaaactaatgctgaaagcaaagtgacgtttaactcaacctcgacgtctgttccaacagaggtacagacggccgctttcaagctaaagaacggcgagttcagcgacgtgatcgagagcacgagttctagcaccggtgccacgtcctattatattgttgaaatggtcaagacatcggaaaagggcacagatatgaataagtataagaaggaactacaaaatgtaattaagactgaaaaggagcaagacacaacatttgtttctggagttattgctaagtatctcaaaaagaacaacgtgacagtcaaagaaagtgcattcgcgagcctcttttctcagtttacgcagacttcgtccagtagcagctccaaatag

SEQ ID NO: 3191 - DNA, 789 bp, Artificial Sequence
  Optimized genes for Lactococcus lactis
atgacaaagaggatctactcagtgccctatttcctatggatcctattctttgtcatagtacccttagcgatgttgttatggcagtcattttttgatctcaatgggcacttcactctaaataactatatattatacttttctagtgggacttatctcctaatgacgtggaactcgattctttacgcgttaatcattaccgtggccactctcgttatttcgtatccggtagcctatgtattaacgaaactgaagatgaaacagttttggctcatgttaatcatactccccacatgggtaaacttacttcttaaggcgtatgcgtttatagggatatttggcaagtacggcagtgtgaacaacttccttcaatttctaggaataggcagaactcaaatactcttcactgatctttccttcatattggtagcctcgtacatatcaatcccattcatggttttaccgatctttaacgccctcaatgatctagatgacaatcttgttaacgcgtccgcggatctcggagcttcgaggttccagacgttcacccaagtcatatggcccctctcactcaatggagtccgtgcgggagtacaagctgtttttattccatctcttagtttgtttatgttgacacgacttattggaggtaacaaagtgataacgttagggactgctgttgaggaacattttctgaccacacagaattggggtatgggctctacgattgctgtggttctggtggtagctatgctgcttgtaatgcgcatgactaaagagcgtagagactaa

SEQ ID NO: 3192 - DNA, 1068 bp, Artificial Sequence
  Optimized genes for Lactococcus lactis
atgaagaagctctcgtatttttttgtgggtatccttattataacagcttcccttgggctaattaccaatcgtatgaaggccgcggacggtgtcaagacacagaataactcacttactattttcaattggggcgagtacatcgatccggacttaatcagtaaattccagaaggaaacaggttataaggtgaactatatgacttttgattccaatgaagcaatgtactcaaaggtcaaacaggggggaactgcttacgatttgatagtaccctcggattatatgatcgaaaagatggcgaaagaaaatttactcattaaactggatcactcgaagataaagggattaaaagatgatgatccgaaactgttaaatcccgcgtttgaccaagggaatcagtattccgtcccgtacttttgggggacactgggaatagtatataattcgaagacagtcacccgacctcctaaaacgtggaatgacatctggtcgccgacttataaaaattccatactgcttacggactcggtacgcgacgtcatggccatggtactatccaagcatggttattcactgaatacaaccaatcagaaggaactggatatcgcctaccaggatttgttgaagttaacacctaatgtaaaggccatcctcggtgatgaaatcatgaattacatgattaacaacgaaacgccattggcagtagtatattcgggccaggtagccgaaatgacctccgaaaacaagaatttaaaatatgtaatcccagaacgaacaaatatctggtatgacaatctagctatcccaaagacggcaaagaacgtaaaagccgcatatgcttttatcaattttatgcaggaacctaagaatgccgcgcagaatgctcaatggataggctacgctactcctaacttgaaagcgaaggcacttctaccgaaagaaattagggacaataaatcattctatcccgatgaggccacaattaaggatgacgaagcatataaaaatctcaatccatattggactgggatctacaacgatctatatctcgaattcaaaatgaacaaataa

SEQ ID NO: 3193 - DNA, 591 bp, Artificial Sequence
  Optimized genes for Lactococcus lactis
atgacctatccgcaattagaacttgagaattacaagggaactaccgcaattatcaacacaaatcatggtaaaatgaccgtcaagttattcgataatctagcgccaaagacggtcaaaaattttatagaactatcaaaggagggctactacgacggtgtgattttccatcgaataataaaggatttcatggttcagggcggcgaccctacgggaacgggaatggggggctcgtctatctacggggagaagtttgaagatgaattttctatggacctattcaatctgcgaggtgcactctcgatggcaaatgcagggcccaacacgaatggcagccagttttttattgtgcagaataaaaaccttccctacccgaaggactctttgatacagggtggctggccggaagaggtagctgaaacttacacgggcggtggcacgccccacttggatgggcgtcatactgtattcgggcaacttgtggacgaagagtcatacaaagtcctcgacgaaattgctgccgttcgggtaggagcccaggacaaacccgtagacgatgtcgttattgaatcagtcgagataatcgaaccttag

SEQ ID NO: 3194 - DNA, 1074 bp, Artificial Sequence
  Optimized genes for Lactococcus lactis
atgtttgatcaattggaatcgattgtggggcggtacgaagagttgggtgagcttttgtccgacccggaagtcgtctccgatactaagcggttcatggagctttcccgggaggaagcggaccttcgcgacaaagtggcaacttataacgagtacaaaaaggttttggagaccatatccgactccgaggagatgctgggggaaggtggtttagacgatgacatgaaggaaatgttgaaggaggagttgtcctctgcgaagtcccagaaagagttgttggaagaggaaatcaaaatattgctcctgccgaaagatcccaatgatggcaaaaatattatactcgagatccgtggggctgcgggtggagacgaagccgcgctctttgcaggagacctactaaatatgtatcagcatttctcggagtctcaaggctggaagtttgaaattatggaggcaaacataacgggtataggcgggtataaagaggtgtccgctcttataagcggaccgtctgtctacagcaaactcaagtatgaaagtggcgcacatcgtgtacaaagggtgccagtaacagaaactcaagggagagtgcacacaagcactgcaacggttttggtgatgcctgaggtggaggagttcgagatgacaatcgaccaaaaagatctcagggttgatatctatcacgcgtctggtgcgggaggccaaaatgtcaacaaagtcgcgacagctgtgcggatggtgcatctacccaccgggataaaagtcgaaatgcaggaagagcgtacccaacagaaaaatagagataaagcgataaagcttctaaatacaaaagtgttcgattattatcagcaaattgaactggataagcagaacgccgaaaggaaatccactgtgggaacaggggacagaagcgaacgcatacgtacgtacaacttcccccagaatcgtgtgaccgatcatcgaataggattgacgctccaaaagctggattcaatcctgtccggcaaaatggatgaggttattgatgccttgattgtatatgaccagacaaagaagcttgaggagcttaataaatga

SEQ ID NO: 3195 - DNA, 1851 bp, Artificial Sequence
  Optimized genes for Lactococcus lactis
atgaagcaaagcaaaatgcttatacctaccttgagagaaatgccctctgacgcgcaagtaatctcccacgccttacttatgagggccggttacgtgaggcaagtatcagctggaatttatgcctacttaccattggccaaccgggtgcttgaaaagttaaaaaatattatgcgcgaagagttcgatgagataggagctgtggagctacttgcacccagtctattgaccgcagacctttggcgagaaagcggtcgttatgatacctatggcgaagatttatataaactaaaaaatcgagacaacagtgatttcatactcggaccgacacatgaagaaaccatgacatcgttagtccgagacgagataacgagttacaagaaacttccactaaacgtctaccagatcgcacctaagttccgagacgagaaacgtccccgatatggtctgttaaggggaagagagttcttgatgaaggacggttattcttaccatgctgatcaagacagtttagacgagacgtacaacgactataaaaaggcatacgaaaagatatttgagcgagcaggcctgaatttcaagccgataattgctgacgcaggggcaatgggagggaaagactcccaggagtttatcgctatcaccgatgatcgtatcaatttagagaaatggttagttttaagtaaaaatattacttcaatagaagagattccagaatccgtgctgtccgaaatcaaagaggagctcgggaagtggctaatagcaggggaggacacaatagtgtatgcagagggtggcgattacgcagcgaatattgaaatggccagctcacaatttgaaccaaatgttgcgtacactgaggagctcgaactcgaaaaggttgccacaccgggggctaagactatcgacgaagtatcgaaattcttagaaattgacgaagaacagacggtgaagacccttgtatatcatgcagatgatgaactggtagttgtcttgctgaacggaaacgatcagcttaatgaggtgaagctgacgaattatctcggagcatcctttattgaggcagccagtgaggcagaggttgaggagaaatttggggctcacttcggttcactgggaccgatcggcctggagaacgtgaaaatcatcgcggaccgcaaggtagagcagataaagaacgccgtggtcggtgccaatgtagacggtttccattataaaaatgccaactttgggcgcgattatgaggtagaggagtttgtggatctgcgcaccgtgaatgagggagaaatatctccagatgggaggggtacattaaaattcgctcgaggaatagagataggacatatcttcaagctcggaacgaggtacaccgaagcaatgaatgcgaatattctggacgctaacgggagatctattcccatgctaatgggttgttatgggattggtgtaagccgtctattgtctgctatcctggagcaatttgcccgaatatacgttgagaaaacaccaagagaggagttcaaattttcttggagtattaacttcccgaaagaactcgccccctttgatatacacctggtgcccgtgaatgtaaaagatgaagccgccatggagttgactagtgaactcgaagagaagctgcggggcaagggttatcaagtattggtcgatgatagaaacgaacgagcaggagtaaaatttgctgacagtgacttgataggcctacctgtgagggttacgataggcaaaaaggccgccgagggcgtcgttgaggtgaagataagggctaccggtgaagtggttgaaattaacaaggacgagttggtcaataccattgaaattttatcaaagtga

SEQ ID NO: 3196 - DNA, 591 bp, Artificial Sequence
  Optimized genes for Lactococcus lactis
atgacaaaaaagacagagattaacttcgggattgacagcaaattagaaatacgggacgctaataagaaggctggattcataggtcaaattgctggctacgctattgtatttaacaaaccctcagtcccaaacgcgccctttatagagtacatagcccccactgcccttgacaatgtggatttgtccgacgtgctagctctttataatcatgactacgccaatgtattgggacgagtagacgctgggacgttaaagctgtcgattgacaacataggcttgcattttgtactggacatgccagacacgacagtagggcatgacgtctataacaacatcaaggccggcaacttaaagggtatgagtttcggattcgttgtcgctgacgggggcgattcttggcagcagggtgtaagcaaaccgatcagaacaatcaaccagctgcaaactctgggagagatatccgtagtttccaaaccggcgtatgatgatacatcgataaacgtaacccggtctataaagcaattcgaggatgagcgcacaaggaagtataaggagaaagtccgagcctatcttgacgggctgtcagattaa

SEQ ID NO: 3197 - DNA, 813 bp, Artificial Sequence
  Optimized genes for Lactococcus lactis
atggaatacggtgtattgtcggttatcttggtaattgtagtggcgtttttggcaggactagaaggaatcctagatcagtggcagttccatcaaccaattatcgcctgctctttaatagggatagtgactggccatgcaagtgctggaattatcctgggaggttctttacaactcattgctttaggttgggcaaatgtaggtgccgcggtcgccccagacgccgcgttggcctcaattgcgtcctcaatcctcatggtccaatctaataatttcgacctaacgcatataatgggaacaatagtaccggcggcgatattattagctacagctgggttggtattaacaacgctggtcaggatgttaagtgtagtattagttcaccaggctgatcgcgctgctgaaaacggcagttactcaggagtcgaaatgtggcacttcattgcactcatctgtcaaggattgcggatagcaattcccgcaggtctgctgctagtaatctcgccagacgcgatacaaaaagcgctagcagccatacccccagtaataagcgggggcttggcagtcggaggagggatggtagtagccgtcggatacgctatggttattaatctcatggcgactcgggaagtgtggcccttttttttcctcggattcgccctagcgcccatctcggagctgactctgatagccacgggggtgttaggcgttgtgatcgcgatcgtatatttgaatctccaagcatcgggtggatcgggaaacgggacggcgagtagttcaggagatcctatcggcgacattcttaacgattattag

SEQ ID NO: 3198 - DNA, 267 bp, Artificial Sequence
  Optimized genes for Lactococcus lactis
atggcctcgaaagagtttcatatagttgtcgagacgggcatccacgctcgcccagctactctattagtacatacagcttcgaagttcacgagcgaaatcacgcttgagtataaaggtaaatccgtaaacttgaaaagcatcatgggcgttatgagtctaggcgtgggacaaggggccgacgtaactatttccgctgagggagctgacgccgatgatgccattagtacaatagctgagactatgaccaaggaaggtcttgccgaatga

SEQ ID NO: 3199 - DNA, 1509 bp, Artificial Sequence
  Optimized genes for Lactococcus lactis
atgaacaagcgcgtgaaaatcgtttcgactctagggcccgccgtcgagatccgcggaggcaaaaagttcggtgagtcgggatactggggtgagtcattggatgtcgaggcatctgcaaaaaatatagcggcgctcattgaagagggcgccaatgttttccgattcaatttttcccatggagatcacccggagcaaggggctaggatggccactgtacatcgcgcagaagaaatcgctggccataaggtaggcttcctactagatactaaaggccccgaaatgaggacggaattgttcgcggatggcgctgacgcaatctctgtggtcaccggtgataaattccgagttgctacgaagcagggcctcaaatcgactcccgagctgattgctcttaacgtcgctggaggacttgacattttcgatgacgtcgagattggccaaaccatattgatagacgacggtaaactaggactatctcttacggggaaggacgctgcgacacgagagtttgaagttgaggcacaaaacgacggcgtcataggcaagcaaaagggggtaaacataccgaatacaaaaataccctttcctgcattagctgaacgggacgacgccgatataaggttcggtttgagtcaacccggcgggataaactttatcgcaatctcatttgtgcgtacggcgaacgacgtaaaggaggttcgaagaatctgcgaggaaactggcaacccgcatgtccaattgctagccaaaatagagaaccaacagggcatcgaaaacctggatgaaattatcgaggctgctgatggtattatgatcgctcgtggtgacatgggcatagaagttccctttgagatggttccagtctaccaaaagctaataatatcgaaagtaaacaaggctgggaagattgtcgtcacagccacaaacatgttggaaagtatgacctataacccccgtgctactcgctcagagatttcagatgtgttcaatgccgtaatagacggcacggacgccacgatgcttagcggggagtccgctaacgggaagtatcccagggagtcggtacggacaatggcaaccgtgaacaagaatgcgcaaacaatgctaaaggagtatgggcgcctgcaccccgaacgctacgacaagtcgaccgtgactgaagtggttgctgcttctgttaagaatgctgcagaagcaatggatataaagttaattgtggccctaacggagagcggaaatacggccaggcttatatccaagcatagaccaaatgctgatattttagccatcacttttgatgaaaaagttgagcgaggcctaatgataaactggggagtgataccaaccatgacggaaaaacccagcagcacggacgacatgtttgaagtcgcagaaaaggtggctctcgcgtcaggattagtagagtcgggcgacaacatcatcatagtggcaggcgtacctgtggggacgggacgaacgaatacaatgcggataaggaccgtgaaatag

SEQ ID NO: 3200 - DNA, 399 bp, Artificial Sequence
  Optimized genes for Lactococcus lactis
atgaagaaagagggcatacttaactctgagctcgccaaaatagctgatgatctggggcatactgaccaggtatgtatcggggacttgggtcttcctgtccctagtggggtaaagaaaattgacctagcattgacacgaggcaagccttcctttcaggaggtgcttgatatatatctcgaaaatattctggtagagaaggtgtacctcgcagaagagatcaaggaaaacaaccctgagcaactcgctatcttattaaccaagctatcagccgacgtcgagattgttttcgtatctcacgaaacgcttaaacttatgaatcacgaggtcaaagcagttgttagaaccggcgaaaacactccttattcaaacataatcctccagtccggagttgctctttga

SEQ ID NO: 3201 - DNA, 669 bp, Artificial Sequence
  Optimized genes for Lactococcus lactis
atgactttggataaccatcattgtgtgcaactagtcccattgttcgaaaaattagctgagcaggatctaacgaaagtagagaaaatcgttgaacacaagaaaattaaaaaaggagaaataatcatatcccccgataaggaaccattacttgtgattgtggctcagggcgctctaaaaataagccaactatctcagagcggcaaagaacaattactcagaattatagaggcaggagactacgaaggagaaggggccctccttggggtgacgaatggccagttatacggccaggcaatgattgacagcaccatttgcttcctacggcaaagtgacttcgagacactgttgaccacatatccgagtttaagcctacaattgctaaagctcaatgccaaaaaatatctggccgccgaacatcaagccggctttctagcccttgatgacgttgaagccaggctcgcccattatttcctcaacctatcagcgactagcgattccatttacttcgagatccctatgaagctcaaagaactggccaattacatcggcaccagccccgaaactataagtcgtaaaattaaagtgttcgaggaaaataaaataataagccggcagggcaggatgattaaattactggacaaggagaagctagaggatgactttgcatga

SEQ ID NO: 3202 - DNA, 597 bp, Artificial Sequence
  Optimized genes for Lactococcus lactis
atgtattaccctgaacccatcgctagactcatcgaaagtttcagtaaacttcctggcataggccaaaagaccgcgacgcggctcgccttttacaccatcggaatggaagaccaggatgtcaatgaatttgcgaaaaacttacttagcgccaagagagacctaagcttctgttcgatatgcggaaacctgacggaatctgatccatgcgcgatctgcaccgatccaactcgggacagaaccacgattctcgtagtggaggaatctaaagacgtcctcgcgatggaaaaaatacgggaatatcgaggcttgtaccatgttttgcatggtaccatatcaccaatgaatggaatttcgcctgacgaaattaacgtgaaaacgttgattacacgactaatggatagtgaggttaaggaggtcattattgcgacgaatgccacgtccgatggcgaggccactgccatgtatctagccagaatgataaaacccgctgggatcaaagtgacgcgccttgctcgcggtctggctgtcggaagcgacattgaatatgccgacgagattacgttatctaaggctgtcgaaaatcgccttgagatctga

SEQ ID NO: 3203 - DNA, 975 bp, Artificial Sequence
  Optimized genes for Lactococcus lactis
atgctagacaaaatctcggtggtcgtaacctgtcataaccatgaagcctacattgagcagtgcttacgatcggtgttcgcccagacgtaccgtaacattgaactgttggttttcaacgatggctcgacagaccaaagtggacaggtaatagagaagattcttaaagaaagtccgtttagcgagacgttttatttttcggaggaaaatagaggcattgtttctattaggaacgatgctcttaccaagatcaagggtgatttccttctgtttgtcgatagtgacaactatttagatgaccaatacatagaaatactccaccaaagtctgcaagagcagaacgtagatattgcatactgccagttatgggacttcgtgaatagccgtcaggttttacgagacgacctagagttctctcttgataaggaattagaaggtaatctcatcgacatgagctctctggtaagagtttcgaagatcttaaatgttcggtttgatgaacagctgaatcacaaagctctagaggattacgatttttggttgtccttgatcttaattaatcatgctaagccaatatttgttaaaggtattaaattgaactaccgagtgttaaacacaagtcgcacggagagagggaattgggataagtactacgacagctatttttacctgctggaaaagcaccaaaccttactgccaaaagaagttttaaaggcatcgcaagcgaacgtaaaaatctggttgaaaagttacttagaatctgaccaacaactgacagaaaacatactaaagattaaagagaaggataagcatattagtaatttacaacgcgaaattgatctgttaaaaagcctcttagcagcgaaagaagacgagatagataagaccaaggctgaactggaggagaaaaaacaagaaatcgacataataaaaaatagtaagagctataaatttcttcagaagctcaaaggcaactga

SEQ ID NO: 3204 - DNA, 1644 bp, Artificial Sequence
  Optimized genes for Lactococcus lactis
atgaagttcagcgaactaggactcagtgaaggtatagtaaacacgcttacagaaattggctacgaacaaccaaccccgatacaagaacagactataaaattggctctagaggggagagatgtactgggacaggctcaaactggaaccggaaagacagcggccttcggcttgccaaccattgagaagattgatgccagcaatccagccatacaagcgcttgtcattgctcctacgagagaactcgctgtgcaaggacaggaagagctgttccgatttggtaaatcgaaggggttgaaagtccgtactgtatttgggggaagttcgattgaaaaacagatcaaggggctgaaggcaggcgcgcacatcgtagttggaacgcccggacgcttagttgaccttattaaacgcaaagcgataaagctggaccaactcgagacattaattctagatgaagccgatgagatgctcaatatgggatttctagaagatatacacttcatcatagaaaaaacacccgaggcgcgccaaacacttttattctcagctacgatgccgaatgatatcaaaaagataggcgtaaagttcatgaagaaccccgaacatattaaaatcgcagctaaggagatgactgcagatagaattgaccagtattttgttaagaccaaggagttcgaaaagttcgatgtattaactcgccttcttgatgtcgagcgacccgagttggctatcgtgtttggtcgtaccaaacgacgggtcgatgaactgattcgtgggcttaaactacgggggtatagagcagagggcatgcatggtgatttggatcaaaacaagcggcttgcggtattacgcgatttcaaagctggacatatagacgtactggtggcgacggatgtggcagcgagaggcctagatgttagtggggtcacccacgtctataattacgatattacccaggaccaggaatcctatgtgcaccgaataggcagaaccggtcgagctggaaaatcaggccgaagcgtgactttcgtatcgtacaacgaaatgggttacctaagagctattgaaaacatgaccaaaaagccgatgaaaggattaaagccacctaccaaggaagaagcgtaccaggcatctctctcggtcgccatggacgatgtccttcgagatctcagtgacgactcggcaaaagcgaaactagctaagttcgacaagcaagccgctagcttactagaaaaattcgacgcaaaggaactagtggctctattgcttcagggtagagtgaaggatcccgataatcaggaggaggtcaagataacagcggagcgcccactcccgtataatggagaaggcaaaggattcaaaaaaaagggtaagggagggggtggacgatataaaggcagaggtaatggtgaccgggatggaaacagaggtggttacaggggtaaccgcgacggcaaagatggtgacagagggggcgatcgtaagcgtaattggaaggatcgcgatgataatcggggaggttatcggggaaaacgggatgaccgccgcttcgacgatagaaagcagggagagaaaaccccaagaaaacggacaactggcacagaaaagtccgccggtttcgtaatgcgttcccgtggagacaaatga

SEQ ID NO: 3205 - DNA, 1038 bp, Artificial Sequence
  Optimized genes for Lactococcus lactis
atgtccctcccgctttaccaacagatatctgatgatctgaagcagaaaatagttacgaagacatttaaaagtggagatcaactcccaaccgaaaaagagctctctgaaacctactcggtctctcgaattacggcaaagcgtgcattaactgagcttgagcagctaggattagtatcgcgaactcgaggaaagggtacgttcgtccaagagcttaacaaaaaccatactaaactattaaaacgtgtgctttttatcatacccttcgaaggtatgtcctttggtgacttcacccagggtcttgttccggcattaaaagtagaaaatacgacggtgtttataacatatgagagctatctcaaagaaaacacggcagatgatattaaggagaattttgatggcttgatctactatcccatgtacacagaggattatctagatatactacttgaactgtctctacagaactttcctgtagtccttctagacaagcagatctacgacctaggattcccgtgtgtttcctccgataacttcaacggcggagagcaagccgcacaggctctattaaatctaggccacaaacgcatagcgtttgtcgcgtctaacgatacccaccaccctcagactactcgcaaccgctatttgggttacgtcaaggtgcttaaggagcaaggtatcaagttccatactacccttgacgactctctttatactgagtccagcgtgctagagctcatccataacgaaaaggtaaccgggctcatttgtgagaacgacctcgtagcactacaaacgatgaagactctacaggacagccacttctccgtaccgaacgacatatccattatcggattcgatgacattcaagctgccagtttgagcaatccacctttaacaacaatagcccaggattttatcggaatgggcaggattgcgggtgagttgttgctggactggatcaaaagtggtcagacacctaaagacgttaaggttcctatcaacttaataaaacgtaaaaccaccgaggaactaaagtaa

SEQ ID NO: 3206 - DNA, 774 bp, Artificial Sequence
  Optimized genes for Lactococcus lactis
atgtcccaggatctttctcaaaaaaacaaaccatacctgacgaaagtgaaaaaaatgcgtatcaacaagtatttagctcatgctggagtggcctcgcgccgaaaagccgaagaattaatattggcggggaaagtgacggtgaataacgtgccgatgacgaacctgggttatcaagtttctactggggatatagtcgaggttaacggtgtcgccgtctataacgaggagcccgtttactacttacttaacaaaccccgtggatacattagcagtgtgtccgacgacaaaggacgacagactgtcatggacttgatgccacaagttaaagaaaggatctaccccgttggccggctcgactgggatacgtcggggttactacttttaacaaatgatggtgagttcaccaacatgatgacgcacccgcgccatggggtggacaaagtttacgttgcaaaggttgaggggcaagctaataaggaaaatctgagaccactgactttaggaatgaccattgaaggaaagaaggtgtcccccgcgcggtacgagataataaagcaggagaaaacaaaaaaccactccattgtgtcgctcaccatccatgaaggccaaaaccatcaggtcaagaaaatgtttgctgcagccggattaccagtgcaaaaacttagtagaatccagtatggttctcttacacttgacggattaccgaccggacaattccgacgcctctcgaagaaagaagtctctcaattaattaacgctgcgcaaggcaactag

SEQ ID NO: 3207 - DNA, 465 bp, Artificial Sequence
  Optimized genes for Lactococcus lactis
atggacagcaataaagctgccgaggtttttcttacgaccgttatcaagcgtggaaaagctgaaatgatgcaccgctttaatacctattctcagggagagcatttagttctcgggtatttatacaaagaagcggggaaacagatagtaccgtcaaaaatcgcgaaattcacgcacacatccacagctcggatagctaccattctcaataatctggaatcgaagaatttagtgactcgggaaatttctcgaacggatcgtcgtaaaatcctagtggcgataactgacaagggacggcacgtggcggaagagattcgagttgaagcctgcagcaacctcgcccgcgtcttcgaagaaatgggggaagagcgtacggaatctttcatcgaaaacttcaaattatttctagaaatagggatgaagttagccaaggaagataaagaaaaggaagaagagaagaatgcctga

SEQ ID NO: 3208 - DNA, 405 bp, Artificial Sequence
  Optimized genes for Lactococcus lactis
atgaatataaagaaggctgctgagctgtcgggaataaagactgataatataaggtactatgagcggataggattgatacccaagattactcgaactgaatcgggaatcaggaactttaccgaagcaaatatcagaacgttaaagtttgtgaagcacatgagagatgccggagtccaagttgaacccttaaccaggtacatggccttggtcaacgaaggtaaccctgagactaaggaagaacggatcgagattcttaaaaaccaggttgaacaactacggaccgagataattgagaagcagagtgcactcgattatcttacatttaaaattgaaaactatgatgaagtcatgttacccaatgaaattaaccttaaccaaagctctaaagaaactataaagatttga

SEQ ID NO: 3209 - DNA, 900 bp, Artificial Sequence
  Optimized genes for Lactococcus lactis
atgatcctcattacaggtggcaatggtcaacttggcactgagctgagacacctgctcgacgagcgaggcatggcctacaccgctactgacgccaaggaacttgatataactgatggagttgccgtcgacaagttcttcgatgagaacaagcctgagttagtataccattgtgccgcctacactgctgtcgacaaagctgaggatgaggggagggaactggatgagaagatcaacgtagacggcacaaagaatgtggctgaggcggctgcgcgcgttggggccacgctagtctacatttccaccgattatgtgttcggtggaacgttaccaatcggtcaagaatggccagtagatgcaccaaaggctcctgaatctgaatatggacggacaaaacatttgggtgaagaagcagtagtagcgtcgggtgtgaaacattacattatcagaacggcttgggtcttcggctcttatgggcctaactttgtatttacaatgcaaaacctggccacccggttcccggagttgactgtcgtgaatgatcagcacggcagacctacgtggacgcgcacgctcgcggaatttatggtttacctagtgtcggaaaaagccgatttcggcttctatcacttgacaaacgatgcggcacccggggaagatgttacatggtttgattttgccaaagaaattctgaaagacacagacgtcctagttaagccggtggactcttccaaattcccggctaaggctaagcgccccttcaattccacaatgagccttgaaaaggctaaagcaacggggttcgtaatacccacatggcaggaggccctagcctcaatgcttgagaaaggtgacctccgtgaaaacaaggatggggttaagggagagatcaacaaaaaataa

SEQ ID NO: 3210 - DNA, 696 bp, Artificial Sequence
  Optimized genes for Lactococcus lactis
atgctaaagctacaaaaaaagcttaaaaacgactatggtcttgtgtttaacgacgaagacctccttaaaacggcgttcacgcattcgtcatttacgaatgaagagaggttgccgaaaatagcgaacaacgaacgtctagaattcttaggggacgttgccttgagtttagtgatttctgattatctctaccgtacataccctgagaagctcgagggggaacttagcaagatgcgcagtagtatagtgcgaacagaatcgttggcaaattttagcaggtcgtgtggtttcggcgagttcctgagactgggccacggggaggaaaaaatgggcggccgagaccgcgagaccacgcttgaaaatctgttcgaggccttcctgggagctctattcatagatcaaggaatggacgaagtacgaaagtttatccagcacgtcgttattcctcatgtcaaaaatgacgattacgtcaaagtgattgactacaagaccgagttacaagaagttctccaaattgggggggaaactaccatctcctacaagatcctgaaggaggaaggccctgcacatgacaggtccttcgttgcggcggttttcaataacggcaaagagcttggccgggggctcgggaaatcgaagaaggttgccgagcagaaggcggcagaaaatgctataaaaggtcagaatcatgtgtcatga

SEQ ID NO: 3211 - DNA, 879 bp, Artificial Sequence
  Optimized genes for Lactococcus lactis
atgaatatagtgctgaaactggagacaaaagaacgccaacaactcgcggagaaatacaagagctacgagcaagtttcgaaaaacccgtatataacgttctttgcaaaagtagggaaaaccagtatatcagtctatacatcagggaaagtggttttccaggggaacgaagcagagaagctagccagtgatttcggtcatatagctcaagtggtccctcaaaaacaaacaaacctaattggcaccgacgaagtggggaatggctcttacttcgggggcttaatggtcactgcctcctttgtctcagaggaaaacctgaacttcctcaaggagattggagtggcggatagcaaaaaactgaccgatgaaaagatctgccaaatcgctcccaagcttatcgacaggattcctcatgtggcattagttgtggaaccagcgaagtacaacgaggttattgcatcaggatacaacgccgttagtataaaggttgcgctgcacaaccaagctatatatctcttagagaaacaactcggccacaagcctgaaaacatagtgatcgatgcatttaccacggaagctaactataagaagtatgttaataaagagcagaatcatcctctcacaaaggtcactttattgacaaaagcagaggatcagtttttggctgttgcagtatcatcgattatttcgcggtacttatttttagagaacttaaaaaagctgagtaaggagtccgggtttacgctccccagcggtgcaggaaatctgtcggataaaattgcggcacagataataaagagccagggggtcgacgcgttaaaccaattggcaaagctacatttcgcgaacactcagaaagccataaaaatagcccaactgtaa

SEQ ID NO: 3212 - DNA, 777 bp, Artificial Sequence
  Optimized genes for Lactococcus lactis
atgggtcagacaataaaggagataaaagccactctagccaaattaacggaccttagtgcgaaagagttcctagaatatgaggccgacgagagggctggggttcaagctgccttaaaatcgcggaagaagcaaattttagcggaacttgctgaagaagcgcgtttggagcaaatgcttgaattcgaaaaagagttatatgggcaagagatacaactaatcgcgggtattgatgaagtgggccgcggcccgcttgcaggtcctgtagtcacagcagcagttatcctaccgaaaaattgcaagatacgaggccttaacgactctaagaaggttcctaaatcaaaacaccacgctatcttgtctgagattcaggagaaggctctagcaataggcatcggcatagtcgatgccgagaaaatagatgaggtaaatatctacgaggccacgaagatcgctatgatccaggctgtaagtaagctctctgtcaaacccgagcatttattgatcgatgcaatggtgctcgactttccgatcgctcagacgaagatcattcacggggatgcgcggtccgcatctattgctgccgcatctatcgtagcgaaggtaacccgggacgaaatgatgaaggaatttgcactagaattcccggagtacgatttcgaacataatgcaggctatgggaccgccaagcatttggaggctttgacaaagtatggaataacacgaatccatcgaaagtcctacgagcccatcaagaccatggttaatttcaagtcgtag

SEQ ID NO: 3213 - DNA, 354 bp, Artificial Sequence
  Optimized genes for Lactococcus lactis
atggctatcaagaaaacgtatcgggttaagcgttctaaggatttcgaccagatattttcagctaaacattcgttcgcgaacaaaaagttcgtagtctacaagcttaacactaaccagcctcattttcgcgtaggcctttccgtgtcgaaaaaactcggacacgctgtgcttcgcaatagaatcaagaggctgctgcgccatgctatagcggagtttaagccttatctaaccgacgaggattttgtgatcattgcacggtctggtgtggagacgctatcgttcgaagaagtcaagaagaacttaaagcatgtacttaaattaagtaaaatttatgtagacggagaaaatgactag

SEQ ID NO: 3214 - DNA, 381 bp, Artificial Sequence
  Optimized genes for Lactococcus lactis
atgagcaacagaaagctgggtcggactagctcgcaaaggaaggccatgttacgcgatttaactacagatcttattattaacgagacgatagtaacaaccgaggcccgagccaaggaggttcgtcggactgttgagaagatgattaccttgggcaaaaagggggatttaagcgcgcgtagggctgctgccgcctatgttaggaacgaaattgctatcaaagacttcaatgaagagacggagacgtttccgactgcgctacagaaactatttaacgacctcgcaaaacgttatgagggtcggaacggtggttacacgcgtatactaaaggtcgagccacgtcgtggtgatgcagcacctatggcaattatcgagctagtctag

SEQ ID NO: 3215 - DNA, 360 bp, Artificial Sequence
  Optimized genes for Lactococcus lactis
atggcgcgggttaaaggtagcgtagcgacacgaaagagaaggaaacgcatcctgaagttggccaaaggatattacggggcaaagcataagttgtttaaaacagctaaggaacaggtgatgaactcgtattattatgcctttagggaccgtaggcaaaagaaacgcgattttcgaaaattgtggatagctagaataaacgccgccgctcgaatgaatggcttgagctactcgaagctcatgcacggtctaaagttggcagacatcgaagtgaaccgtaagatgctagccgacatagccatcgccgacgccgcagcgttcacagcactggctgaagaagctaagaaagctttggccaaatga

SEQ ID NO: 3216 - DNA, 348 bp, Artificial Sequence
  Optimized genes for Lactococcus lactis
atggcggagatcaccagcgcaaaggccaccgctaagactgtccgcgtgagcccaagaaaaacacggctagttatcgaccttattaggggcaagagggtagccgacgcaatagctatcctaaaattcactccaacaaaagcggcagttgaagtcgagaacgtcttaaatagtgcaatcgcgaacgcggaaaataactttggtttggagaaggctaacctggttgtatccgaaactttcatcaatgaagggcccacgatgaagcggttcaggcctagagcgaagggttctgcaagccctattaacaaacggacggcacatattactgttgttgttgccgaaaaggagtag

SEQ ID NO: 3217 - DNA, 246 bp, Artificial Sequence
  Optimized genes for Lactococcus lactis
atgaaacaaaacatacacccgaactatcagcccgtggtttttatggacaccacgacgggtttcaagtttctaactggcagtactaaaggatccaaagaaactgttgaatgggaggacggaaatacataccctctcattagagtggaaattagcagtgatagtcaccctttttatactgggaggcagaaattccaggcagcggatggtcgaatcgcgcgatttgaaaagaagtatgggaaacagtaa

SEQ ID NO: 3218 - DNA, 135 bp, Artificial Sequence
  Optimized genes for Lactococcus lactis
atgaaacgcacttaccagcctcataaaaaaagtcgaaagactacgcatggctttcgttctcgcatggcgaccaaaaacggaagacgagtgctagcagcgaggaggcgaaagggacgcgcgtccctaacggtttag

SEQ ID NO: 3219 - DNA, 117 bp, Artificial Sequence
  Optimized genes for Lactococcus lactis
atgaaagtgcggccgagtgtcaaaccgatttgtgaatattgtaaagtaataaggcggaatggtagggtgatggtcatctgcccagcgaaccccaagcacaagcaacgacaaggctag

SEQ ID NO: 3220 - DNA, 939 bp, Artificial Sequence
  Optimized genes for Lactococcus lactis
atgattgaattcgaaaagcccaagataacgaagtttgacgaatcggaaaactacggcaaatttgtggtcgaacctcttgaaagaggctacggaacgacattagggaattccctccgacgtgtactgctaagctcattacctggggcagcagtcacaagcatacagatagagggagtacagcacgaattcgctactataccgggtgtccgagaagatgtgattcagattgtgctggcggtaaagggcatcgccatcaaaagctatgttgagtccgaaaagcaaattgagttggacgtcacaggtcctatggacgtgacggccggcgacatattgacggactccgatattgaaattgtaaataaggatcactatttatttagcatagccgaaggccattcaatgagagctgtgatgactgtcaaaaagggctacggttacgtcccagacgatgaaaacaaggtagacggcgcacccataggtacgattgccgttgattcaatttatactccagtgtccaaggtcaattatcaggtggaacccgcgagggtcggcggtgacagttcgtacgacaagttgaccctggagatcaccactaacggaacaatagtcagtgacgaggccttatctctttctgctaagattctaacagatcacttgaatctttttgtagaccttagtgaggtcgccgccgaggccgagacattggtcgttaaggatgaggtaaaaacagaacgtgtgctagacaagattatcgaggagatggacttttcagtgcgggcctataatggcttgaagagagcaggtatcaatacagtcgcagacatcgtcgaaatgagcgaggcggatatgattaaggtgaaaaatctcgggcacaagagcgtagaggaggtgaaagtgaagcttacggaacttgggctaagtttaaagaaacgaaagtag

SEQ ID NO: 3221 - DNA, 564 bp, Artificial Sequence
  Optimized genes for Lactococcus lactis
atgaagattactgctctagaaggccagaagattagtgaattaagtatgattgaagtggcccacgctctattggagcagaatggcaaagaaatgcagtttagcgaaattatacgggctattcaagattatctagaaaagtccgacgatgagataaaagcctcaatatcgcgcttttacaccgaaatcaatactgacgggagtttcattcccctaggtaataacatatgggcgctccgcagctggtacgcgattgacgagattgatgaagaagtcattgcattggatgagatcgaggacgaagaagaagaaaagcccgcaaaaaaacggaaaaaggtaaacgctttcggtatagaagacgagatagatccggaagatgaagaaggaaccaaagaaaccactgaagaagacatgtcctatgacactcaagccgaagatgaagacaaagacgatgtagcggcatatgatgctgagctcgctgaagttgagttggacaacgttgatgaggaagtggatatcgacgttgaagacgacgaggatgactctgatgatacggatgaagactag

SEQ ID NO: 3222 - DNA, 1227 bp, Artificial Sequence
  Optimized genes for Lactococcus lactis
atgaatgaatttgagacattgttaaattcggtcgaggatgtgaaagtccgcgatgtagttaaaggcgaaatattatcagtggagaacggccaagcaaccgttgcaatagtcggtacgggggtcgagggtgtcctcactctgagggaaattacgaatgataaagacgctgatatcaatactttcgtaaaacccggggacgttcttgacttgctggtcatcaaacagatagtaggtaaggaggctgagggagcaaacgtctatcttctctctctgaaacgacttgaagcacgtaaagcttggacgcagctcgaggggaaggaaggagagatcgtaactgtgaaagtgaccaaggatgttaaaggtgggctctctgtcgattataacggcgtacggggatttattcctgcgagtatgatagacacctattttgtaaaagacacgaagaaatttgtaggggaagagatagaggcaaaaattattgaagtaaacgcgagcgaaaacaggttcattttgtcgcgtagagccgtggtagaggcagaagcgatagaaatgcggaaagaggcatttgcgcaattacaagagggagatattgttgaaggtactgtaagccgggtgaccaactttggggcattcgtcgacctaggcgggatcgatgggttagttcatgtttcggaactatcccattcacgaatcaaaaggccatcagatgcggtaaagccgggtgatgtagttaacgtaaaaattctgaaattagaccctgaggcaggcagactgagtttatcgcttaaggctactcaacccggtccctgggaacaggttgaggagaaggcgccagtgggaagtacggtagagggaaccgttaaacggcttacagatttcggggccttcgtggagttgtacccgggagtggaagggctagtacatgtctcccagataagctgggaacgcgttgagaatcccaaggacgtacttaaggtcggtcaagtagttaatgttaaagtactggatgttaaacccgctgaagagagaatcagtctctcaataaaagcattagaagaagcaccagcgaggccagctcggaacaacgataacgacggtgagaagcgtgatcgtaaaccacgtgcaccccgtaaagcggcgaaaccaagttatgatttacctgagacgcaagaagggttcagtctggccgacttcttgggggaggatttcgacataaacgatttgtag

SEQ ID NO: 3223 - DNA, 294 bp, Artificial Sequence
  Optimized genes for Lactococcus lactis
atgacaaagtatgagatactgtacatcattcgacccaacatagatgaagaggcaaaagctgccctcgtagagcggttcgatgggatcctaaccgataatggggcagcgaacctcgagtccaaggattgggagaagcgaaaattagcctatgagataaacgattttcgcgagggaatttatcacatcgcgacatttgaggccgagaccacctcagaagcgctatctgagttcgaccgtctggcgaagatcaatctcgacattctgcggcatatgattgtaaaagtcgaagcatag

SEQ ID NO: 3224 - DNA, 393 bp, Artificial Sequence
  Optimized genes for Lactococcus lactis
atggcacaagtccaatacgccggaactggacggcgcaagaacgcagtagctagagttagactggtccccggcacggggaaaatcacggtcaatgggagagaggtcgaaagttatatcccacacgctgacatgcggctagttataaaccagcccttcgccgcgactcaaaccgaagggtcctatgacacactcgtcaatgttaatggtgggggggtaagtggccaagctggcgcaataagacatgggatcgctagagccctcctccaggtagaccccgacttccggtcggcacttaaacgggctggactattgacacgtgacgctcgaatggtagagcgaaagaaaccgggcctcaagaaggcgcgtaaagcctcacaattctctaaacgttaa

SEQ ID NO: 3225 - DNA, 309 bp, Artificial Sequence
  Optimized genes for Lactococcus lactis
atggctactaagaagattcgaattcgtctaaaggcatacgaacatcgtattctcgatgcggccgcagagaaaatcgttgagacagctaaacgcacaaacgcggaagtatcgggccccattccattacccaccgacaggagtgtgtatacggtgattagagccacgcacaagtataaagacagccgagaacaatttgaaatgaggactcacaagcggttaatcgatattattgagccgactcaaaaaaccgtcgattcgttaatgaagttggatctaccgtctggagtgaacattgaaatcaaactctaa

SEQ ID NO: 3226 - DNA, 186 bp, Artificial Sequence
  Optimized genes for Lactococcus lactis
atggcgaagaagagtatggtcgttaagaatcaaagacctgccaagtttagtacacaagcatatacgagatgtgaacgatgcggacgcccgcattctgtttatcgaaaatttaaactatgtcggatctgccttagggaattagcttacaaagggcagctgccgggggttaaaaaagcaagttggtag

SEQ ID NO: 3227 - DNA, 270 bp, Artificial Sequence
  Optimized genes for Lactococcus lactis
atggctatatccaaagaaaaaaaacaggagatcatcgcgcaatacgccaggaaagagggggacaccggatctccggaagtccaaatcgccgtgcttacatgggagattaaccacctaaatgatcacataaagtcacacaagaaggatcatgctactcagagaggtttgatgaaaaagatcggacatagacgcaaccttctgggctacctgcgaggaaaggatgtccagaggtaccgtgaattgatagcatctctcggccttagaaggtaa

SEQ ID NO: 3228 - DNA, 261 bp, Artificial Sequence
  Optimized genes for Lactococcus lactis
atggaaagaaagcaacggaaggtatatcagggcagggttgtttctgacaagatggacaaaactattacagtagtcgttgaaactaaacgcaatcatccggtgtatgggaagcgtatcaactactcaaaaaaatataaagcacacgacgagaacaacagcgctaagactggtgatatcgttcgcataatggaaacccgccctcttagtaaggataagcatttcagattggtagagattgttgaagaagctgttataatatag

SEQ ID NO: 3229 - DNA, 279 bp, Artificial Sequence
  Optimized genes for Lactococcus lactis
atggggcgctcgctgaaaaaggggccattcgttgacgaacacctaatgaaaaaagtagaggctcaggtaaatgcagaaagaaaatctgttataaaaacctggagtaggcggtcaacgatttttcctaatttcgtggggctaacaatagcggtctacgatgggcgcaagcacgttcccgtatatgttcaagaagacatggtggggcacaaattaggggaatttgcacctaccaggacatatcggggtcatgctgctgatgataagaaaacgcgtcgctaa

SEQ ID NO: 3230 - DNA, 177 bp, Artificial Sequence
  Optimized genes for Lactococcus lactis
atgtccaaaacgttagttagaaaaaacgagtcgcttgatgatgcactaagacggtttaaacgttcggtgactaaagcaggcactttacaagagcttcgaaaaagggagcattacgaaaaaccgtcagtgaaacgtaagcgaaagtctgaggctgcacgtaaacgcaaaaagtactga

SEQ ID NO: 3231 - DNA, 1197 bp, Artificial Sequence
  Optimized genes for Lactococcus lactis
atgacctaccatattaaaactattggtaataacatcgatcaaatcgctttggacgagatcggtgaggggttccttgttaaccaggtaagcgaggcggagtccgacgcgttcatctgtcgcgcacaaccattccatgactacgagttttccaaggcattattagctataggacgggcgggtgctgggttcaacaacatcccaatcgagaagtgtgcctcgaaaggcatcgttgtctttaacgctccgggcggcaatgcgaatgcggttaaggaattagttttgtccatgatgatttttggtacgaggaacttaaagccggcgaacaagtggcttaccggtcagaagggggatgataacacgatcgatggggccgtcgaacacggtaagaaagctttcagtgggtcggagattagtgggaagacattgggagtaattgggctagggaatataggatctaaggtcgccaacgatgcacagcgtttgggcatgcgtgtaattggatacgatccttatttgagcatagagcacgcttggaacttgtctcaccatgtcaaacgtgttaatgacttagcggagatctttgaaaaggcagactacataacggtgcatacccctgctactgatgaaactacgaaaatgctcaattggaagaatctctcaaaatgtaaaaaaggtgtaatacttctaaattacgcaagagatgagatcaccgacaaagaggctgtgcttaaagcgatagacgagggcattgtgcgattctttggtaccgactttggtagcgaaaaattttatcatcatccgcaggtatttctaactccgcatctgggaggctcaaccgcagaggcttcgcttaattgcacgcgaatggcgctcgattcggtccaaacttatttgaaaacaggagagataataaattcggtgaactttccgcgtgtattgcaagaactgaatacgccgtatcgcgtaacgctgattaacaagaatgttccaaatgtagtggctcaaatatctctagcagtcgctgcggagaatataaacatagctaacattgtaaatagaggacagggagattacgcgtatacactcctagatctcgatgagaaagatgagggcaagctagccgccttggttagcagatttgaggccgctgacaacatcattcgagtgcgcttaattgagaatcagtccttggtctga

SEQ ID NO: 3232 - DNA, 651 bp, Artificial Sequence
  Optimized genes for Lactococcus lactis
atggcggcaaaaggacttttagtcatggatgtcgactcaacattgatcgaggaagaggttattgatctgctaggtgaaaaagccggcatgggagacaagatctcagaaattactgctgcggcaatgtcaggggagatagattttaaggagtccctacgggagcgagtcgcgctactatcgggtttgccgacaacgatatttgatgatgtatacaaggaaatacatttgactaaaggcgcgacggggctcatagagacattacacgcaaagggatggaaggtgggattggtctccggcggtttccacgagatcgtggacaaaatcgcccgagacttgaaaatcgactacgtcttcgcaaatcgtctctcggtggagaacggacacttgacgggcaaaacccatggcaccgttgtggataaagactttaaagtagaccggctcaagcagtgggcaaatgaaaacaagctcaacctaagtgaggtgatagctgtcggcgacggagctaacgacatacctatgctgaatactgccggaattggcatcgccttttgcgcgaagccggccgtaaaggcggcggttagttaccacattgacaagcgtaaccttctaactgttctcgagtttgtagataaactggctgataaggagtga

SEQ ID NO: 3233 - DNA, 1098 bp, Artificial Sequence
  Optimized genes for Lactococcus lactis
atgatctacaatttcggggccggtccttccgtactgcccaaagaagtcctcaaaaaagttcaagaagagctactggattttgagaaatccgggatgtctgttatggaaatctcacacagatcaaaggcctttcaaaaggtcattgatgaggcggagaacgacctccgcgatctcatgtctatccctcaaaactataaaatactatttctccagggaggtgctagctctcaattttcaatggtcccgatgaacctcgcaataggaaaaaaagcatattataacatatccggagcatttggagagaaggcttatgacgaggctgtaaagttaagccattttctcgacctaatggcaatctcccttgggtcgacaaaaaaggataattacaatcatttgctgaagattgacaagtctaagattgacgaaaaaaacggagcttaccttcatctgactacgaacaacaccatagaaggcacatctatctttcctgaaaacctaccggagttcgcctctttaccgcttgtcgctgacatgtcgtctaatatattggctgtggactacgacgtctctaaatttggcttgatttacgcaggagcccagaaaaatctagggatcgccggtttgacgatcgtcataataagagaagacttgctaaacgaggcagagtctttaagctctatgatggactatcaaattctcgttgaaaatggatccatgtacaacacgcctcctactttcgccatatacgtcgccggcttggtatttaagtgggtcaaggcccaagggggagtaaagaaactcgaggagatgaaccaaaggaaggcacaacttctgtatgatctgatcgatcagtctgatttttaccaaaatcccatcaagaataaggatgaacggtcgatatgtaacgtagtatttacatcaccatcacaggaactcgacgaactgttcacgcagaaagcagaagaaaagggtttcaagtccctaaaaggacatcgatccgtaggtgggatgagggccagtatctacaacgctttcccgctagagggcgtcgtggaacttgtaaagttcatgaaagagtttgaggaaggttacaagtaa

SEQ ID NO: 3234 - DNA, 648 bp, Artificial Sequence
  Optimized genes for Lactococcus lactis
atgaaaaataagatcttggacctacgcgcgtatttcatagcgggcccccaggacttcccaaagctttcgatcgacgacgcaatagacaagattagtgttatcattaaaagcggtgtgactgtttaccaatttcgcgacaaagggacgatatataagaacaaaaatcagcgtttggaggttgccaaacggctccaagaagtggctcagaaggccgctgtttcatttatcgtaaacgacgacgtcgagctcgcacgtgaactaagtgctgatgggatacatgtcggacaagacgacgacagtgttagcaaaattcgagaactcataggccaagaaatgtgggtgggcctctcagtttctaatgacatggaattagaaagtgctcagaagtcaggagcggactaccttggaattggccccatttaccctacgaattctaaaagtgatgctgcggaaccaatcggggtagaccatctaagaaaaatgctcgagcataaccagctccccacagtcggaataggtgggattactgaaaattcgctcactgaactgagcaagattgggctggggggagtcgccgtcatttcgctgctgacggagtctgagaactacaagaatatggtgcagaaaattaaacaaaatatccgctaa

SEQ ID NO: 3235 - DNA, 1176 bp, Artificial Sequence
  Optimized genes for Lactococcus lactis
atgacgcagtttactacagagttgctaaattttcttgcacagaaacaagatattgacgagttctttaggacatctcttgagacggcaatgaatgatctgttgcaagcagagttgtcggcgttccttggttacgagccttacgataaggttgggtacaatagtggtaactcgcgcaacggatcttattcgcggcagttcgaaactaaatatgggactgtacaattatcaattccacgagaccgaaacgggaacttctctccagcactactccccgcgtacggtcggcgtgacgaccatctcgaagagatggttattaagctataccaaacaggagtcacaactcgagaaatctccgatatcatagaacgaatgtatggccatcactattcaccagctaccatcagcaacatctctaaggctacccaggaaaatgttgcaaccttccatgagaggtctttggaggcgaactatagcgtccttttcttggacggcacatacttacccctccgtagagggacggtctcgaaagaatgcatccatattgcattgggcattacgcccgagggccaaaaagccgtgcttggctatgaaattgcgccaaatgagaacaacgcctcttggtcgactttactggataaactgcagaaccaaggtatacagcaagttagcctagtggtaactgacggatttaaaggccttgaacaaataataagccaggcctacccgctggcgaaacaacaaaggtgtctcattcacatctccagaaatttggctagcaaagtcaagcgcgcggaccgagccgttattctggagcaattcaagactatatatcgcgccgagaacttagagatggctgttcaggctctggaaaatttcatcgccgagtggaaaccgaagtaccggaaggtcatggagtccctggaaaatactgacaatctcctgactttctatcaatttccataccaaatctggcattcgatttacagcacgaacctgatcgagtcacttaataaagagattaaacgtcagacaaaaaagaaagtccttttcccaaatgaagaggcactcgagagatacttagtaaccttgtttgaagactataattttaagcaaagccagagaattcataagggctttggtcaatgtgctgacacactggaatcgttatttgactga

SEQ ID NO: 3236 - DNA, 1029 bp, Artificial Sequence
  Optimized genes for Lactococcus lactis
atgaagacgagaagtcaccagatgaaaaatgagctggagaaggttatgagtgggcgcgatatgaccgagaatgaaatgaatatgttagcgaattctatcatacagggagaactctccgaagttcagatcgcatcttttctagttgcgctcaagatgaaaggggaagcggcgtcggagctgaccggcttggcgcgggcgcttcaaaaagcagctataccaataccaacaaacctgacgaatgccatggataactgtgggactgggggggaccggtccttctcctttaacatcagcacgacggctgcattcgtactggccgcaggaggggttaatatggctaaacatggtaaccgttcgatcacttcgaaaagcgggtctgcggatgtgctcgaagccttgggaatcaatctctatctaccagcagagaaactagcgcaagtttttgataaggtaggtctggtcttcctgttcgcacaaaaccttcaccccgcaatgaagtacttcactcccgtacgaagacagctcgagattccaacaattatgaacctgaccggaccactcatcaatccgataccactagatacccagctcctggggacctctaggcctgatctccttgagttgaccgctaatgtcctgaaagggcttgggcgaaaaagggcgctggtcatcactggggagggtggaatggatgaggcgactccttttgggctgaaccactatgcacttctggaaaatgacaaggtcacactacacgagtttcgtgcatcggaggtaggcatttctgaggtgcagcttaatgacatacgcgggggtgaggcgccggagaatgctgaaatcttaaagaacgtgctggaaaatcaaccttccgcttttctagagacaaccgtcctgaatgcgggacttgggttttatgctaacgggaaagtagacagtattaagtcgggagtcgatttggcgagagaagtcatctcgaccggtgctgcgctcaccaaacttcacgaactccaagccgagcaaatcggttag

SEQ ID NO: 3237 - DNA, 1188 bp, Artificial Sequence
  Optimized genes for Lactococcus lactis
atggccaaggaggtatatgacagatctaaacctcatgtcaatataggaacaataggccatgtggaccacggcaagacgacgctctcagctgccatatccaaagtattaagcgataaaggctactcaaaagcaacggattttgcaagtatcgatgccgcgccggaagagcgggaacggggaatcaccatcaatactgcacacattgaatatgagaccgagaaacgtcactatgcacacattgacgcgcccgggcacgctgattatgtaaagaacatgattacaggagccgctcaaatggatggcgcgatccttgtggtcgccgcaaccgacgggcccatgcctcagacacgtgagcacatcctcttgtcacggcaagttggggtcaagtacctaattgtctttttaaataaagcagatctcgtagatgatgaggaactcatggagttggtggagatggaggttagggacctgctatccgaatacgattttccaggtgatgacattcctgtgatagcaggatctgcgttaggagccttgaacggtgagccacaatgggtggctaaagttgaagaactgatggatatcgtcgatgaatatataccgactcctgaaagggatacggataaaccactcttactacctgtcgaggacgtattcagtattacaggacggggaacggtcgcttctggtcgaattgaaagagggacagtcaaggtcggggatgaggttgaaattgtcggcatcaaggaggagacaaaaaaggcggtagtaacaggaattgaaatgtttcgtaaaactctcaccgagggactcgctggcgacaacgtgggggctttgctgcgcggcatacaacgagatgagattgagagaggtcaggtgatagcaaaacctggcagcattacgccacacaagctatttgagggggaagtttatgtattgtctaaagaagaaggagggaggcacacaccgttctttgataattatcggcctcagttttacttccatacgactgatgtaacaggctcggtaaaattacctgaaggaacggaaatggtgatgcccggtgataacgtacacatcgacgttgaactcattcacccagtcgcgatcgaacaaggaacgactttcagcataagagaaggtggacgcacggttgggtccggtatagtagctgaaattaaggcgtga

SEQ ID NO: 3238 - DNA, 1371 bp, Artificial Sequence
  Optimized genes for Lactococcus lactis
atgaagaaaaaaataatctctgccattcttatgtctacggtcgtattaagcgccgctgcccccctatcaggtgtgtatgcggacactaatagtgacatcgccaagcaggacgcaactatatccagcgctcaatcggcgaaggcgcaagcgcaagcacaggttgactcgcttcagagtaaggtcgactctttgcaacagaagcaggcgtctactaaagcacaaattgcaaagatagaatcagaagccaaggctctaaacgcacagatagccacgctgaatgagtcaattgctgaaagaactaagacacttgaagctcaagcaaggtctgcccaagttaattctagcgctacgaactatatggacgcagtggtcaatagtaaatcattgacggacgtaatccaaaaggtaaccgcaatcgctaccgtcagttcagctaacaaacagatgctggagcagcaagaaaaagagcagaaagagttgtcgcaaaaaagcgagacggtcaaaaaaaattataatcagttcgtatcattgagccagtcactagacagccaagctcaggagcttacctctcaacaagccgaactaaaggtagcgactttgaactaccaagcgactatagcgacggctcaggacaaaaaacagagtctccttgacgaaaaagcggcggccgagaaggcagcgcaagaggctgctaaaaaacaggcagcgtacgaagctcagcagaaagaggctgctaaggcccaagcggcttcaactgcagcgactaccaaggctgtggaggaagcaacatctacggtgtcttcatcccaagctagtcaatcatcctcttcaagttcaaatacgtcgagcaataatacgtcgagtaactcgtcttccagctcctcaaattcatcaagctcgaactcgtccagttcatccaattccagtaacggggggggaagtacaaatacgggtaataacaatgccgccgggactggcaacacgggaggttccagttcctccgggattaattctactcctatcgctaatccctatgcaggggggggatgcacggactatgtatggcaatattttgcagcccaaggtatttatattcgcaacataatgccaggaaacggaggccaatgggccacaaatgggccggcgcagggggttctacatgtcgttggtgccgcgccgggtgtaatcgcgagttcattttcagctgatttcgtaggttacgccaatagtccttatggacatgtagctatcgtgaaatcagtaaactccaacggtactatcaccataaaagaaggaggatatggtacgacctggtgggggcacgagcgaacagtatctgctagtggggtcactttcctgatgccaaattga

SEQ ID NO: 3239 - DNA, 468 bp, Artificial Sequence
  Optimized genes for Lactococcus lactis
atggctaaattcggtttcctcgacgtactagaggaagtgctggaaaagggattcacgtacgactttgagatgaactgggataaaagaaatttcgctgtagaagtctccttcctgctagaagcagagaattcatctggagcgttgcttactgacgcggaaggcgtagaaagcgcagaaaacatagtatacgaagacgcggtgctcttctacaatcctgctaagtcacgcttcgatgagaacgactatttggctaccatcccttatggtgaaaaaggcttaagccgtgagtttttagcatatttcgctcaattccttcaggaatccgcagatcaggggcttgatgatttaatggatttcctggcggacgaggcagcggaggaattctcggtgaattgggataaggaagcttttgaaaatgggatcgcagacctcagtgaaaccgatttctacaagtacccccggtattga

SEQ ID NO: 3240 - DNA, 300 bp, Artificial Sequence
  Optimized genes for Lactococcus lactis
atgatgaacatgcaatcaatgatgaagcaagcccagaaattgcaaaaacaaatgcaggtatcgcaggaggaaatcgcaaacacgacatttgtaggaaaaagtgcccaagatcttgtaacggtcgaatttagtggcgacaggacattaaagtcgcttgacataaagcctgatgttattgaccctgaagatccggagacgctccaagacatggttacggatgctgttaacgatgccctgtcacaaatagaaaaggtaacagaacagaaactgggtaaatttacgaaaggtttgcctttctag

SEQ ID NO: 3241 - DNA, 5952 bp, Artificial Sequence
  Optimized genes for Lactococcus lactis
atgaagagcaggaaaaaagtaatctctatcattttaggactcatgctgctccttcaatacgttataacgccagttggtgcaatagctggcgcgataaatgaagagacgaacgacagtgacataactttgagccaatttaagatcgatgaatccgaatcaaatgcggatctaatgacttttgacttgtcgctcaaaattaatcagtcgattttgaaatcaaagaccacgattatagagcttgacaaaagcataaagatcaatgaacccaatgaggccaatagacagaaaagcacggcatcatatacagctgacgagaaccgactaacgatcgacctcaattcactaaatactggggaggtgaaggtaaacttctctatctcgaaagaactactaaaaaacttcgagcggttgacggcaaaacttaacgattcgcaagtggatgtattgttgccgaagacgtccagtactagcgagacaccgtcacaatcgacttctaccgttacacagaatacggtgacgcctgaaataaaagagaaggaatcatccacgacaaagcactccgagcaggcaatcaagactgtggaatcacaggatattcgtaagcttctggaggacagtggaatatcgcctgcgaccattattgatagtgctaaagttatctacctagacaaagaaggaaagccttaccctgaccagaccgacgtcccaatcgacgccgaggttcagatagattatacctggtctatcccggaagatattttgccgctaaagagtggcgactactttgattttaaactgccggacggcgttacaatagagcaagctacgtccagccttggcgattacgggacgtatactataaacgccgacggcacagtgcgttttgtgtttaatgaaaaagttgaaacgtaccacgatataaagggcacttttcattatgacgctcactttgataaaacgattgtgccaggagaagttgtggtagacacacctactgaagagaacttccctccgtctgaaatccatgtcaggccgacttatgaccaagctatagacaaatctggtcacttcgataagactccaaatccaagcgaagttatctgggaaattaacatcaaccgtcccttgaatactatggagaacgcgaccctaacagatccgatgcccgaagggactacttacgagtcggtcgaaatctatcctgagacggtgggcaagaatggtgaaattatatcgattgataaggagcatccgctagtaaagggcactgactataccgttgattcgaatggcaaaataactttcataggaaagtatgcgacaaccgaccaggccttcaacgttgtctacacgactacaatcgatgagtcgagcttccccgaaaaggagggtgccgtgtcgtttaaaaataccgcaaccttgaatgacggaaaaaccgatacaaatgaaagcgcttccgtaacggctcagtacaaaggtcccataaaaaagaacggaccctttacgacgggaaatgaccagatctataactggaacattgagtacaattacaacgagaagaaccataaggctggaagttttatcgaagatacgatgtctgatgctatcgagctggttaacggctctgtcaagctttacaaaattactttcgattctaatggcaaagagatcaagggagcgcaacttaaggagggtgaagattacaaattggtgcaggatccggacaatccccagaaattcaaaatagaatttataaccgacatcgactatgcggtgaaggttgagtaccagacaaaggttaaagatatcgtggatggcaatgtaaccatagataactcagttacgacagatactggagacaatagtgaatctggtgggaacgcgacgcaacagggaatagtaaaaaatatagacggggatatagattacgaaaacagagagatcccttggaaaatcgatatcaacagtccggggtattggatggaaaattggtcactggaggataagatgtcggaaggacttactttcctcgagaatacgttccagattattgacaaaacagcgggcaacaaagtcctgagtccaactgagtatacactcattaaaactaccgcagggttttcggtttccttcaattctccgttaaaagaaggaaccgatcacaagtatcagatcaaatacaagacgaaattcgataccagtgtgatcgacaatggaagcggtcacgaaggagatattaagtttgttaacgacgccagtatgacgtggaaagataaaaacgggggagaccacacgaacaatgaccataaggagttcaagcctatcccgcctttccagtataacggacagaaatccggttcgtataacgccacaagtaaaaaaattacttggaccatcgctgccaactttaatcaacaagagctaagcaacgcgtccattactgatcctatatccgatgatcagaattatgtctccggctctgctaaagtgtacgaagccactataaacaaaaacggcacatacacactaggcgctgaagtcacaagcgacatggggatcaagatagtcgaaagcaagggatctgtcaaagttgaactgcctgacggttctacgaaggcatacgttctgatatttgagacaagcttggagggcaatctcatcaaccagaaagagtacaaaaataaagccactttcacgaacaaggacatatcgcatgatttgagcgcgagcgtcacgcctgcacatcaaggtgagttcgtgactaaggacgggtctcagtcgtccactgactctaactacgtgaattggaagttaactgtcaatgccagtcaatcaacactgaaaaacgtagaagttactgataacccttcgtctaaccaatacatcgtagctaaagatatacttatctacggtaccagcattgatgcttccggaaacataactgagaataaaaacataattctagaacagggcaaggactacagcgttgacatacagactgacaattctaccggggcccagactgtaaaaataaagtttctgtccgaaataaatactgcgtacgtcgtggaataccgtgccctaataacgtcggataaggccaacgacgttgtgaccaatcaagcgcacatcactggggataatgaaaagatcatagagcaggatgttgaaaaagatgttcccgtgaccaaccacaatggatctgctaatggctccaaaggatcggttaccttagaaaaagttggccctgggaaggcaaagctggctggtgcacaccttcagctgtggagcattgggactgatggaaagaaggataaactaatccgagagggtgacactgataagaatggggatttaaaacttggtaacctgcgggtcaccgactatttactaatagaaactaaagcacccaccgggtatactttagatgaggagctagtaaaggggaaaaaaattacggttgccaaggacggagaagtaagtaattttccgatccaagatgtggagaatgaacctactaaagtgatacttaaaaaggtcggcctgaccatcgaaaacggaaaagaggtaaaaaacccgctgcaaggcgccgagtttaaggtacttgactctaacggtcaggtagtgtccgggtacgagaagctaacgtcagactcttctggtaacgtgactatcgaaaagttgacccctggtaagtactcgcttgtagagacaaaggcccctgcaggttatatactggaccctactcccattgacttcgaactcaaagcaaacgaagaaggcatcattccggatatcaacttggagaaggtcaattaccaaggctccgctcagcttataaaacataattcgaatggccaagcactaagtggcgcaatatttaaagttattgacaaggacgggaacacgattcagacgaatttaagcagtgacaaggacggaaaggtcacagcaactggcctgagtcccggagattattcgtttgttgaaacgaaagctccgactggttacattttgaacaccattccagtacactttacgatatctgccgaggaggaggggcagcctcagatggtaattgcgtcggataatttcataaactatcaaggatccgcagagttgattaaacaggataacgagggtcaaccgctatcgggtgctgtattcaaaattgtcgacaaggcaggaaaaacgatacaggcgaacctaacgtcgggcaaggacggcaaagttgtagttgacggtcttgctcctggggaatattccttcgtcgaaacaaaagctcccacgggatacattctgaacacaaaccctgtccactttacgattagcgataaggaagagggacaaccgaaaactattatcgcctcagactcattcgtcaattaccaaggttctgcccaactgattaaacgtgatagccaaggtcagccgctcctaggcgcgattttcaaggtagtcgacaacacgggaaagctggtaaaagagggtctgacatcggataaggcgggaaaggttaatgtcacgggattagcgcccggggactattcttttatcgagacccaagctcctactggttatatcctgaacacaattccaacgccttttacgatacttgcagaatccgaaggtcaaccccaactcgttgtcgcatccgataacttcattaactatcaagggagtgcagaactcatcaaacatgacattaatggtcaggccttgagtggcgccatattcaaagtgatagacgcggacggaaaaaccattaaagaaggtttgacttccgacgaaactggaaaggtcttgatagagggcctagtaccgggcgactactcctttgttgaaacaaaggcgccggagggatacatcctaaatactctgccggtaaacttctccatctccggggaggaggaggggaaggtaaaggtggtcatggcgtctgataattttataaattaccagggtagtgcagagctgattaaacacgattcacaggggcaagctctggagggagctatttttaaggtagtggattcaaagggcaagattattaaggaagatctcgccagcgacaaaacaggtaaggtcctaatagataacttagctccaggtgattactccttcgtcgagaccaaagcacccagtggctatatactaaacacgtcaaaggtagatttcacaatttctaccaaagaggagggccaacctaaggtcgtaatggcttcagataatttcatcaattaccagggttctgcggaattgatcaaacatgattctcaaggccaggctctggagggagcggtttttaaggtaattgatagtaaaggtaagtctatcaaagaaaatctcgtgtcagacaaagaagggaaagtgttaatagaaaacctggtgccgggggactattcctttgtcgaaactaaacctccttcgtcatatattctgaacacctctaaggtagacttcaccatttcaacgaaggaggaaaacaagcccaaaattgtgatggcgagtgagaactttatcaattaccaaggatcagcagagctgatcaaggtcgatgagaacggcaaaagcctatctggggcggtgtttaacgtaacgaactcagagacgcacgaagtggtaatcaaaggaattaagacggatgcgaacggtgtcattaaagcgaaccacctgaagccagggaaatacacattcgtcgaaacagaagctccggccggatatcagctatctcaagagacccgagcttttgaaattaaggctagtgctgagaataagcctcaggtggtgaatactggaaaatttgtgaataagcgcctaccgatcacgccaaagaaacctgagctgcctaaaactggagaagagaggaacacattcctcccgatcgtgggtgtcggcctattgatggtcggtgctacattgtacgtattcttcaaaagacgtaagatgtga

SEQ ID NO: 3242 - DNA, 291 bp, Artificial Sequence
  Optimized genes for Lactococcus lactis
atgctgaaaaatatatgggagtggtttctatggttcaccggcgtgaccgacgctggatggagcgcttggtgggggggctttttctcatgcctccctttgttcggtgtttttgcagtggtctggagacggctcaaatgccatgcaccggggtgtcatcaaatcggcttacaccgcacggctgatggcttgtacgtgctttgcaggaaacatcatcctgatgtacccaacaacctcaccctaaagcatatccaaaagtctcatgtgaacgcaaaggcgaagaaggacaaatga

SEQ ID NO: 3243 - DNA, 642 bp, Artificial Sequence
  Optimized genes for Lactococcus lactis
atgtcttcaccaaagattgattataagaagtcggataaaaactattatctccctaaaggcatctccctaatcgagctacctgctctcaattacttaatgattgatggtaaaggcgcacccacatcccctgcgtttcaggaggcgatccagtacttgtacgcaaccgcctacatgatctcgatgtcgtaccggaatcctgactttattatagagaactttcaacctttcgtagtgccaccactcgaaggcctgtggactagtaagaacgaaccgagagcgggtaagcttgacaaaaatgattttatttggcgtttaatgattagaatgcccgattttgttgactctgaaattgtagagaaagctaaaaagctggttgaatccaaaaagggcttcgatttatctaaagttaaattcgaggcgattcaagacggtttgtgtttacagacaattcacttagggagtttcgatgatgagggcgaaagcttcgaaaagttgtttgaatacgccaaagaacatgaccttaaagcagtgcacaaggagttccaccatagagagatctatatctccgatttccgaaaaaccgccacagagaagctaaaaactactttgcggatattcgtggaaaggggccaggaaaagtga

SEQ ID NO: 3244 - DNA, 1074 bp, Artificial Sequence
  Optimized genes for Lactococcus lactis
atgcccctcaagctcaaacttaaaccttccgtaccaaagtggcgaataaaacgaatgatcaaaaaactaaatattgcgtacgttggctttggtaaaagcacgaaccgttaccacatcccatatgtgaaagagcgtgaaaacatcgtcattaaaaggattgttaacagaacgctgggtaaaagaccagaacaggctgagcttgaagcgaatggcaccttgttttcaacggacattgctgacattataaacgacgattccattgacttggttgtaatagtcactccagcgtttgcgcattacgactatgccaaagaacttctcagtgctggcaagaacgtgctgtgcgacaagccactagtagagacgttagagcaggcgaaggaactagtagctttagcgaaagaaaaaaacttgtttttcatgccttttcagaatagacgctttgattccgattttctaaccgtgaaaaaagtgatcgagcaaggctatttaggtgatttggtagatataacagtaaacatggaccattttaggccgaacgatgcatcccagggcggtaattttgatggagcttggtatggtcatggtgtacatcttgtggaccaaatggtctctctatttggggctccgaaagaggtccaatacgatatccgggctaccagagactacgatagcgttgacgactattttagtgtcaacctcctgtaccccaacctaagggctacagtggccgcgaccgaggtggctgcgttaccgcatcctaagtggttagtctacggtacgcgcggaacgttcatcaagatggacgtagatcagcaggaaaacgatctaaaggttggcatgttcccgggagacgaggggtttgggcaggatagtcccgcggatttcggtcagttaacgtactttaatcaaaatggcgaccgtatcgttaaacacattcccacggttgcaggagattatggtagagtctacgacagcgcctatgagagtataataaatggggctgacaaattagtttctgacgaacagattcttgccgttataaagaccctcgagaacggcttcagcaaataa

SEQ ID NO: 3245 - DNA, 867 bp, Artificial Sequence
  Optimized genes for Lactococcus lactis
atgatcaagttcgaaaaagttaattatacatatcagccaaatagtccgtttgcttcacgagccctcttcgatatagacctggaagtaaagaagggatcatacacagctctaattggccataccggaagcggtaagtcgactctattacagcatttaaacggattgttgcaacctactcaagggacagtccgggtgggggatattgtggttactagtacgtcaaagcaaaaagaaattaagccggtccgtaagaaagtgggcgtagtgtttcagttccccgaatcccagctgtttgaggagaccgtgctaaaagatgttgcgttcggaccacaaaactttggtattagtaaggaagaggccgaaaaaattgcggccgaaaaactagaaatggttgggcttagcaaagagttttgggagaagtcgccgttcgaactgagtggtggacaaatgcggagggtagcaatagcaggtatcctggcaatggaaccagaggtactcgttttagacgagcctacagctggtctggacccgaaagcccgcatcgaaatgatgaagctttttgaaagtatacatcaaaccggacaaactgttgtcttagtaacccacttgatggatgatgttgcggactacgccgattatgtgtatctcttagagaagggtcatataattagttgcggcactccgagtgacgtgttccaagaggtcgactttctgaaagctcacgaacttggggttcctaaagccacacattttgcagaccagttgcagaaaacaggtgtatacaccttcgagaagctacccattacgcgagccgaactagtcaatttgttgacttcgctaagtgtgaagtcgggtggcgagaattaa

SEQ ID NO: 3246 - DNA, 348 bp, Artificial Sequence
  Optimized genes for Lactococcus lactis
atgaagaaaatatacaatataggagtcgaagccaccatggacgtcattggcggcaaatggaagcctattattctttgcaacctacgccacaatccaagccgtccgggggaactgcggcgacaaatcccaggaatcagtcagaagatgttgacccaacagctccgtgagcttgaaatcgacaatatcatagtccgtaaggtgtacaatcaagtacctccgaaagtagaatacagcttgagtccctacggggaaactttgaacgggctgctagacatcctatgttcttggggcgaagggcacgttcaaactcttaaatctatgggagaggaggttcaagtgctggagtga

SEQ ID NO: 3247 - DNA, 1380 bp, Artificial Sequence
  Optimized genes for Lactococcus lactis
atggaaaacttacaggagaaacatgaagcacagagagggcttcaaaatcgacacatccaacttatcgccatagcgggtacgataggcactggactctttctcggtgcaggtaaaactattcaaatgacgggaccctccgtgatatttgcctatattctaatcgggattgctatgttctttttcctcagaacgatcggcgagatgctatataatgatccctctcaacattcattcctgaattttgtgacaaagtattctggcgttcgaactggatatttcacacaatggtcttattggttagtaatagttttcgtttgcatttccgagctaacggctatcggaacctacattcagttctggttaccgcaagttccactatggctaatagagatagtcatgctcgctctgctcttcgggctaaatacattgaatagtaggttttttggagagaccgaattttggttcgcaatgatcaaagttgctgcgataataggaatgattgtcacagcgataattctggtggcggggaattttcattacagcacggtattaagtgggaaaaccgttcatgacagcgcgtcacttagcaatatcttcgatggctttcaattgttcccacacggtgcatggaattttgtcggtgcgctacagatggtaatgtttgcctttacctccatggaatttatcgggatgactgcggcagagaccgttaaccccaaaaagtcactcccaaaggcgattaatcagataccggtcagaatattactgttttacgtgggcgccctacttgccatcatggcgatttttaattggcattatattccagcggataaaagccccttcgtgatggtattccagcttatcgggatcaaatgggccgccgcacttatcaacttcgttgtcttaactagcgcggcttcggccctaaattcttctttgttcagtgcgacgagaaacatgtactcactagcgcagcagcatgataagggccggttaactccatttactaagttatcaaaagccggaataccgattaatgcgctttacatggctacggctctttcgcttcttgcgccagtacttacgctcataccgcagataaaaaatgcgttcgactttgctgcaagctgtacaaccaatctatttctagtagtgtattttataacactatatacatattggcagtatagaaagagtgaagattacaaccctaaagggtttctgacgcctaaaccgcaaatcacggttccttttattgtggctatctttgctattgtattcgcaagcctcttctttaacgcggacaccttttaccccgcactcggggctatcgtttggaccatcttctttggtctttacagtcattacaagaaaatttaa

SEQ ID NO: 3248 - DNA, 813 bp, Artificial Sequence
  Optimized genes for Lactococcus lactis
atgaagtttatcgctattgttggtacgaacgcctcattctcttataatcgaaaattgttgtggtatatgaaaaaacatttcacgaaggaggcgcaaatagagattgtggaaatcacggacctcccgctgtttagcgaggatatccgcgaaattcccgaaggtgtccaaaaaatcgctgaagctattcgggaggaagacggcctcatatttagcacccccgagtacgaccacgctattacggccgcactaaagagcttaatagagtggctctcatggattaaaccccagcctcttaattccttgcccgttatgatagtgggtgtcagtttgggcaacatgggcactgtttttgcgcaagaaaacctcaggcaaattctgagttcccccggtcttgatgcgttcgtattgccctccaatcagttcctgttagggcgtgcggccgaagctttcaatcagcaagatgaacttatcgatgaaaggaccatttcttggctggaacactgttttaacaatttcatgatctattcaaagacattgaaaccaatgcgtctcccgagcttgaaaaaagaaaacaacaaggaaattattgagtctgaagaaagcaagaacagtacggagaccgatgaagtttggtggacaaaagagacgaaccagggccttcccgttctgagtgacgccgacacgggggcaagcgaatatgaagaggtaatagagcccgaaaattccgcgtacctccaatttctcgaagaaggggaaacgtggaagtttgatgacataggagagcttcggggtaagagcgaggaagaggactag

SEQ ID NO: 3249 - DNA, 606 bp, Artificial Sequence
  Optimized genes for Lactococcus lactis
atgtcgaaactcctcgtcgtgaagggtcaccctcttactgcagactattccctgtcactcaagggcctagacgcctttgtcaaagcatacaaggccgcacacccggaagacgaaatagaggaactcgacgtcttttctgcggacatacccactctcaacactgagctggtgtcggcaatgttcgctggagaaaatgcagaactgacagcctcacaaaaggataaattagcgagatttgcggggttcacggaacagttcctttctgcagataaagtggtgatagcaaatccaatgtataacctaatgattccagctgaactgaaaagctgggtagataccgtgaacgtcgcgggtaaaacgtttaagtatacagctgagggcccggttggtcttgccaatggaaagaaagttttacatttgcaggcaaacggaggtgtctatggcgcccaggatccagcaacaatatatatgtctgctatatttaacttcataggatctgactttcggcagatagcggtagagggacacgcgtacgacccggaaaagactgaggagctcttgtcagagttcataaataaggtcgagctggaggcgcaaactttctaa

SEQ ID NO: 3250 - DNA, 192 bp, Artificial Sequence
  Optimized genes for Lactococcus lactis
atgatccacgagctcactgatcgagctcgacagcacttttcgacccggaaaatagatgcgttttggatttttgaagagccaaccacaggagcattgtttgaaggcgggctcgtaagcgaaaacaaggctataacatttgaaattaacgcgaaaactttagaggtcttcgagaaaaatgaaaagatactatag

SEQ ID NO: 3251 - DNA, 879 bp, Artificial Sequence
  Optimized genes for Lactococcus lactis
atgaccgactttaaccaatttttcaacctggaattctggcaaaaaatctttgagttgaacgagtcaccactccggatagcgatagctattctagacatagctataatttctttctttttgtaccaggctatccgttttgtgcagggcacgaaattaatgaccttggtccgaggggttataatcttcatttttatccggattatcgcagggcttatcggattgacaactgtagagtggctgttaaaccaggtgataacatatggagtgattgccggagtgattatcttccaacctgagataaggagggcgctggagtctctaggcaggacaacaactttgtttactccaaccaggaagtcgagtccggacgggcacataagtgcgtacgaaaaaagcttcgcatacatgagcgagcggaaaatcggtgcgttgattgccatagaacagggccaaaacttgaacgaatttgtctctacaggtatcagattggacgcagacataaccagcgagttgttgataaacatattcataccgaatactcctctccacgacggtgctgtaatagttcagggcaataaaattgcggtgacctcggcttacttgcctttaacggaaaagtcgggcatcagtaagcagttcggcactcgccatcgagccgctatcggtctttcggaggtaagtgacgcattgatcctggtcgtctcagaggaaactggcggtatttcaatcgctcacaacggggagttttttgcggacatttccaaagaaaaatttcacgacatattggttgctatactcgtgcccaaggttgagaaaaatgaaaagggcacagggaaaaaccggaagaacaaagcgggcggcaaaaaaaacggaaaatga

SEQ ID NO: 3252 - DNA, 3543 bp, Artificial Sequence
  Optimized genes for Lactococcus lactis
atgtatcgttcaaagcaccagaaaggttatacaacttcccatgaggtgaagaccacacgtttcagaacttggaagtcagggaaaaaatggctatacggagcaactgtcttgactttgactgcatcgaccctgctcccaattggcaatttggcatttcaaccaaagactgaaaaggcccaggctgcctctgtaagcagcggtacattagtgcctgggaatacatcgtatgacaccggcggtcacacctattcgggtacggaattcgcaaacagtagcaattacgccctttacggtaaagcggttgttgcatcaaattggataaatcttgtctcgtcaaccgccaactcagttggcctcggtatattcaatgggagcgtgtctgcgatatcggctacaacggggtttaccttaaaatccacaatcaaggtcgactccggcagcagccttactgatttcactaaatcaggtgatgccataggggtgattcttacaggtgcgtctaaagcccagttggccgctaacgcccaatcttcgcaggctaccaatgatggacttgggattcgtgggttgccgaacaccgttttcctaggtagggacctgtacagtaacctaagcaacgttagcacaggcagcctaactgggattgacggctcagcgaccgttaatggatggaccgacggacctggcgtcgtgatggccatacgaaataccgacagttcgggtacgcttcaggcagcaaattatccttcgctgggttctgccgccccctacagcccagtcacaaacacgcagaacggcaccgcctacacatttgcaacggatacctcttatgctttaggcgttgcctcgccgatcaccagtagtgtgcaggaaccaatcactgtaacttggaccccagacgcaacgaataccgcgtcaactggttatacatccgggacattaacattcaacctgattgcgcaaacgacttctaatggtgcgctaatcggcgcgagcgctgtgaatggtggcacagggggctatacgcttactacccacaccaacctgcagaactccttgacagtcggcttcgtgggagggactggggggaactatggtaacttaagcgtatccttaaacggcgcgactatcacagggtctaaagggacggaaccagttcccatcaattatctcaataaagttactggacagcctatcccgtcgatggcccagtcaagcattaccgcaaatgtcaatgataccattggagcggctttaacagctccaagttcgacatcccctgacaacaacacatacacgtacgtagtaccagcggcccccactggatatcaggcgaattcagcgacgaccacaactgttctcgctgcaaatccagcgagcacaacaaacacgtcagccaccactgtttcgaactttattgtgggaacgaccaatccgaatgcacttaatgtgagttacacacccagccaacagaccgtactattcaattgggctaaagccagcggcaccaccctagctaatctaccaaatcagattgcatatggcgctactggcataaccgatgcatcggtcgtgacggacaacccattttcaaataccaccctgctatcctcctatgcaactgcgctctccaacgcagtcccaacagggtataacatcacacaaatttccaatgggaccacaacagtgagtggggcgacgacagcggccactcttgcggcgttcacctcgcaaaaccctactgtaggagcgacctctactttaaacacgtacacagtaacgctgacggcagtttcccaaaccgcaacctacacttatggatatacttcaacggctctcaatactcccgccatcccagcgatccttaccagcactgggactactggtggtagtgtcactacgccaacaggctataatacatcacctcaaatccctagcggctattacatctcggctatctatgcgggcacatcagcctcggggacactcatctctagctcaaccactaatggcacgaatgctgcatggccttctggccaggtgtatgcacccactgggaaccaatattatatccagctcgcgccaaatacagtgaatgtcacttggtttatctcgatagaccctaatccagataatgacccgctaaatgtggcgcagggtgggtttacccctaccgtgggatcaatcctcggcgggagtacaactactaattatcagtcccaagtgattgataacatgaatagtctcacgggcaacaccctatcaacaactgacaatgttacttataccgacggagcgactggaataaagtatattgtaactggttatcaatatcaagaaggtactacgacgactgctactaattcggctcccatcaccacgtacaagactttcagtgatcttttggcagctcacccttatgtgttagccgggaccaagtctaaccggacccaattggtccatttactcatgactgtggatcagacgacaatcacttctaattccacttcggggcaacacgttaatcccgcaaccaactatatcccttctagtgaaattacctccagcactgacatagacggagctgacgatgacggcctatcctacgccatcaacgggtacaatgcaatcgtgaacattaccggtggtcaaacggattattggggagacgcgaccaactcgctccaactgtcgataggcacctatacagagaattattatgcccttaactatttgggagtgcaggcttatacaaattggctaccttctcactcgggaggtaccgtgagtcagtttctccagactttggatgccacctcgctagcaaatgacacggtcacctctcaaacgacgctcgaagtccaggacgctaccgcgataacgactaataaccatcatattatcccacgtgctgcatcctacaatcccagtagtgacctggtgggagcatctaatgcggacgggtcaagcgttgaaaatattgagaccaatccgatagttaatggagacgcgattggcgtattgatcactgattcgagtggcaacatcctttgggttaataactcggacatctctttacctacaaataaattgcaagaagtaacctacatagaaaattattatgccttaacagcgcaagggcttgtagattacactaactggcaaacaaccacagcaagcggcggtcatactgtcggtgattttattaacagtggccaagcaactacatctgactatgtgaagagtacgacggaactaactgtgacgaattttgtgctaccatttgccggcggagcaggaaatcaatttctatatttaatgatcggcctcgcagcgtttggcgccctagggttctatttcagtcaacgccgaaaggcggagatggaccttgaggtaattaacaaagagatcttaggaaaaaacgataataaacgttcaaacatctacctcacttcgcgtcacacgagaccctatgcgaagatattccacacaaagaaccggacacacctcgctcaagcacaaagaaaagggaccaacgaatag

SEQ ID NO: 3253 - DNA, 240 bp, Artificial Sequence
  Optimized genes for Lactococcus lactis
atggctctcaatgataaactcgacgcgactaaagacaaggtttcagggaaagtaaaagagacgaccggcaaagtgactggcgatgaaaagctcgaagcgaaagggaaaactgagggtttgatggggaaggcgaaggaaggtctggagaatattaaggataaagccagtgacttggccgaggatgtagcggaaaaatttaacgacacagtcgactccgtaaaacacaaaaacgaaaaatga

SEQ ID NO: 3254 - DNA, 255 bp, Artificial Sequence
  Optimized genes for Lactococcus lactis
atgaaaaagtatgataagaagatgaaaaaccgtctcaaacgggccacgggccagctgactggcatcctgaagatgatggagtcaggtgaagaatgtatcgacgtcgttactcaattaacggcagtgcggagctcactagattccctgattggtttaatagttgctgaaaatcttaaagagcttctgttggacaaagaggttacggataaggaagaaaaactggagcaggctataaagcttatcattaaaaaatga

SEQ ID NO: 3255 - DNA, 939 bp, Artificial Sequence
  Optimized genes for Lactococcus lactis
atggttcaggcgtacaagaaattttggctcggggcctttacttttaacaaaaagacatcacgaaaggacttttggagcgccctcctcactcacatcatcatctttgtgattttgtttaaggcctaccatttttttaatcttctcgatttctatcaactgaccacactatggcagacattcgcatcgttcttccagctcatctttaacctatattttttcggttccctcctatcatttattgcactaacagtgcgtcgccttaacgacgcagatttaccttggggccttattttccttaattttatactagggctaggcaccttggtactcttgatactcaatctatttccgtcgtctccccgggccctgaagttcaaggagtacgaaataaacagttctcaagaattcaacaacctccccgagactaaaacgttatcaggaattttcaaggactactttaagaattattttgagttccgtggtagaaccacacgcaggaatttctggtgggttcaactattttggggtttaacagtgatccttttcttattcctgatctacttgtttaaccagttcgagcaaatcatgtttggatacaatttcatcggttcgatggtgctccgcttgttcttcttcctatttattctgggcacctttttcccacaattaaccatccacgtcaggcgcttgcgagacgcaggactatcgaacctggggttaagtctacttttaggcgggaccagcggaattctcattttttatcaaatgtttacaaaaaccttgaaaatcacgtataccacaggacactaccaactagtacaataccttctattcctccttgttatgatcgctgtactttctctaatactggtagaggttatggcgactggggagctcaagacgaacaagaagaatagtctatttgagaaaatagattag

SEQ ID NO: 3256 - DNA, 684 bp, Artificial Sequence
  Optimized genes for Lactococcus lactis
atgcccgggagtgataaaactgtggacagtggagcaatttatattagcaatacagaaccagagtataaggcttatgttccttacctaagtggtaatcctaaacagttgataaacggcgaacaggctctcgtattcgcacgcgaccgggatacgttagctaacggaaactacgggcgggctgcccatcagagggaggtgatgacagaactgatgaacaagatgttgtccctaaatagtgtctttaaataccaatcctttctgaatgatatttcgagcgatttcaagaccaatatctctataaatctcgcaaacctcaccgcactgatggcgtataaagattgcctcaacaaagttgtgtccatccagtaccagggcgtttcccaaatggtagacggtggatcgtacgaatttatcccagaaaacgttgatttggcaatacagaatatcatgcggcaagccaatgacgagtctgtgaacgacaaactagatcagtctgtgataacgtatgaaaactatttcggcagcgaaacagatcaatattacatgccgagcgcaacagtgaccatcaagggcgagaagtcggagacatatggggtagatacaaagggcagtttagtgaaaattaacaaggagaacgcgcaagattacgtgtcttcgcaagggggtgctctagttgcgaactag

SEQ ID NO: 3257 - DNA, 447 bp, Artificial Sequence
  Optimized genes for Lactococcus lactis
atgacatacgaagatttcattaaagaagccggcctcgcacgagagaattttaggtgggcatgggcattttgtaacgaggttgatgggccgattactgagccggaattggcagacaaactcttggacttggtcttagagggaaagaagagcgcaacggcaagtgcggtcgccgagtacggggaagatgaacctttcccatctgttgatggtaaattcgacatcctattagatggcaaaggtcaacctcgtgccgctattaccacctctaaagtgtatgtgcgcaacttttttgatgtgtcagccgagcatgcctttaaagaaggcgagggagaccaatcattggattactggaggaaggtgcaccaggacttctggagtgatctaaaggtttattcaccaaacatggaagtcttatgtgaggagtttgaagtcttgtaccagaactaa

SEQ ID NO: 3258 - DNA, 558 bp, Artificial Sequence
  Optimized genes for Lactococcus lactis
atgaaccaaaccgagaagaagaaaaaggctattttggaaacgacctttcatctcttaaaccagaagacgattcgcgagataacagtggacgaaattgcacataaggctgatgtatcaaaagtcacgctgttcaaatacttccactccaaaaaccaattgataaatcaggttatacgacagaatttaaatcagctttctctggaaatcaaaactcttatagaatcaaacctggatttcaaccaaacatatcaagcgatactgcaactaaaaattcaacaattagaacactatcaacctattttctcggagaacatgatgacgcagtataccaatagtcccgagctgctggatgatgacgcgctttcccttcaaaagcagatatatttacttttgttccaaaaagggcaggccgagggcaagatttcctcagactacagccaggaagacttcttactgatactcagcatttttaattcgggagtgaaaggccttagtatgaacctcctaatcgaaaaggccgagattgttagtagattttttcttaatggatggaaatag

SEQ ID NO: 3259 - DNA, 450 bp, Artificial Sequence
  Optimized genes for Lactococcus lactis
atgacggcgatatggaaggaaaaatcctttaatcaactgactctggacgaaatgtatcagttgctttccttaagaactgccgtattcgtcgtcgagcaaaactgtccctaccaggagttggatggtaaggatcaagtggccaagcacctatggctcgagaatgaaaacggccaactaatggcactttgccgtttattacctaagggaatatcctttgctgaggcttctatagggagggtcctagttaatcccgaatttcggggccaaaacctcggacgcggactaattgaaaaggccttggaagtcctaaaagaagacggagaggaagccgtaacgatagaagcacagtactatttgagggacttttatgcgtccttcgggtttgtggagaacagtgagccgttttatgaggacgatattaagcatgtgaatatgattcttaaattctaa

SEQ ID NO: 3260 - DNA, 657 bp, Artificial Sequence
  Optimized genes for Lactococcus lactis
atgaacaaaaagatatattacatctcaggggcgataacaacattggcattcttaattctagctctctttgtgaagatagacttcactcatggtccatttccatttgatcgtcctatccagacctgggcgttccacctacagtcatccagtggtctgacgtactttttttcacacatgacaaatatatttggcgataaaggggggatcatagtcgccgtcttgctcgcactagttctctatttgctctttaagcaaaaggaggcgacaatatggttcgcagcaacggtcgtattgtcactggcgctgaacacggttataaaggcaatcataggcagagaacgcccagatatccaccggttggctgcgttcgctaacgaggctggtaagtcctttccatctggccactcgatctttgccaccatcatttttggatccatattcttcatatgtttaggaaaactcaagaatcggtcatcaaaaatcctgctcggaatattgtgcattatacttatagccctcattatgttttctagaatctttgtcggggttcattacccgtcagacaccattggcgggtttttagaggggatatcaatccttctcctcacgtatcccacatacattaaatatcaggagaaaagtaaaaagacgaattag

SEQ ID NO: 3261 - DNA, 336 bp, Artificial Sequence
  Optimized genes for Lactococcus lactis
atgatagaggcatgcatccggactaagcgagacaagattgttagttacgagatttcaggtcatgcagaatccggggagtacggtcacgatgtcgtgtgcgcagccgtgtcggtgttatccatcactacagcaaacaatatatacgaaatggctcatattaagccggtcacgcaaatggaagacggatatttatatgttgagattccgttatctatcccagagaagcagggagtactagcacagacccttctcgaagctttcgctaacagtatgaaggctgttgagaagtcttatggtcaatacattacactaaaatttgagaacggcggtcagtaa

SEQ ID NO: 3262 - DNA, 375 bp, Artificial Sequence
  Optimized genes for Lactococcus lactis
atggtgctaattggatttagttccgtgtttttaatttcgttcaatgcattcgttttctttggtttaatgttattctttgaggtgttgttagggtttataaccatcctggtcaacgtacccatgacttcctttttccagtcacaggtccctctaaatatccaatccagatttttcgctctgctgtcattcagcgcaaatttgatcgtacccctaggtatactgtacactggattcctagcatccgccatcggcgctgacgttacatatattattaataacattctagttattgtaattgtgtgttttgctttctggaaggagattggacgagggtttagagcgttcctgcttaaaaagtggaaaatgtctaaataa

SEQ ID NO: 3263 - DNA, 321 bp, Artificial Sequence
  Optimized genes for Lactococcus lactis
atggttgaaaagaatgagatcatcaagagcggagaaatagtcatatcgaatccaattggtggtaaattggttatgaagaggacctcgacatcgaagaaaggaatgaagttcaaggaggtattcgcttcagaagcatccctaattgcaggaaatctaacccaaggctcactacaaattgctaatcaggcgatgtcagtcgcgcagatttttaagcaggcaccaaatggactattcactgctactgtggacccagctaagctctcgaagtttaagaagtggaatatttactatcatggttctagatggcggaaaaaggcgtga

SEQ ID NO: 3264 - DNA, 564 bp, Artificial Sequence
  Optimized genes for Lactococcus lactis
atgagcagccccagaaaaaaggaggggaagggaatccagaacgtattcattcacacaattgcactccgcattgcggagaatgatactcctgtacactcggaactaatagggggggatgtaaagataggtcaggaaaatctccataaccaagtatccatggcaattcggaatccacaagcgaaacttatgagccagctaaatggggacttcattattactaagaagggcgaaacaaaacccttggttaatatacagaagcaaaatttaagcatagcgccgaattcggcgtttgagctacccgtctcgcttaacgaccactttaaaccaggtacatatacttacaaaatagtccttaaaaacgaccacgaagattggcagttcttgaaggacttcactattaaggagtcggaagcgaacatgtacaatcagaccagtgttgactacacgaagaaaacgaacctgaactggattcattatatgcttgtcggtatcactctcttcttgcttctaattctattttacttctgggggaaacggtccaatgatgtgatcctaaaatcttaa

SEQ ID NO: 3265 - DNA, 834 bp, Artificial Sequence
  Optimized genes for Lactococcus lactis
atgaaaaaacaatcccagttgactaataaaaaaattaataaatctgaacctaaaatgactatcataaatctgaaaaatatcaacctaactcggaacaaaaaagaaatactgaaagatatcacttggaaggtgaacccgggggaaaactgggtgatccttggcctaaacggcagtggtaagtcgtcattgttaaaattaatattagcggaggagtggaaaacgtctggggaaattactgttctcaatactcagttcggcaacggagaaattccgaagcttcggaaacgaattagtgttgtcggaagcttcatcgcggagaggttccagcccaacatcaaagccgagaatttagtatatacaggcaaatttaatagttcaatgctttataagccatatactgatcaagagctagatgaggcgcgccaactcctaaggcaaatgggggcaaagtccctgataggacgtaattacgcaagcctaagtcagggcgagaagcaagtactgctcatcgcacggtctttaatactaaaacctgagcttctaatactcgacgaagcgacgaatggcttagatctgttcgccaaggaaaagcttcttaaacaattgcaacagatcaatcagttgaaaaccgcacctaccttaatatacataagccatcatccggatgagattacggacatatttactcacctgttgctactgcgagaaggaaaagtgattcaatcggggaaaaaggaaaatctcctgaacgagaagatccttacggacttctaccaagagaaggttgaggtccatcgttttgagcaaaaatactttgtgataccggccaactga

SEQ ID NO: 3266 - DNA, 303 bp, Artificial Sequence
  Optimized genes for Lactococcus lactis
atggaacatgagtatctctttgtctactcacgattgaagctattgataaaagacgcccacaaatcgttcaatcaagttgaacgtgagctagggtatcccaggaacacgttgaaaaattacaaatataagaaaaagccaagcgtagggagggttttcgagatggccaactacttcaatgtgtccatcgaattcttgttagggattgaggagaaggataataaaaatagcctggcttatcgactcgaaaagctagatcgtgagaaaaaagagctcgaaatcctcattttagagggtcaaaaataa

SEQ ID NO: 3267 - DNA, 171 bp, Artificial Sequence
  Optimized genes for Lactococcus lactis
atgaatcgtacgtttattaagggattcttagcgggtaacgcgctcttgattgcgggccttgcagccaccgcaattggcataaaggcaaaggtgataaatccaatcaaaaaaaaagaagaacaaatcgagatgggccggaagagagcagctcgcaagagaattgccccataa

SEQ ID NO: 3268 - DNA, 948 bp, Artificial Sequence
  Optimized genes for Lactococcus lactis
atgaaaaaagtgtccattataataccatttaaggggcaaactgaggctgagcttatgttgccgttgtctagtatctataatcagattggggtcgatctgtcccagcttgacattcacttagtaaatgatggtggaaaaaccatagatttgagtaaattcgacgtgttagctgatcggctcgaaattcattatcatgaaataccaaacgggggacccggagtcgcacgacagtatggtattgacaattcgatctcggagtatataatgtttatcgatgccgatgacgtactctattatgtgggagctttgtggccattttacaacgctagtaaccagggtcatcaaatgatccgagcgtcgtattgggaacaaatagcgggaaacccttatacgtacactgttcatggaaatggtgataggaaggcagcgtatgggaaatggtacaagcggagttatattgagatgctcggcttgcgattcatgcccgacctgcctatctatgaggacacttactttgtgggtttagcgtgcgaactggcgactgatacctgctttttggaggaaaaggtgtacatgtggctcgccaaccccaattctatcacgagaaccgtagagaacaaatttaattaccaggcccacatatatgctcgtgagaacaggtactggtttgaaatgattcgaaaatggaaaccagaatgtttggttacggatttcgagaattacctgacaaacatgtacctcaaaagccaaaagtacccgcctgtagatgagaaggcgtggtgggaagaacagcataagctgattacatcagtctcagacattttctctggatggacgcaggagcttcaaaagcaagtagaagacaagagtgccaacccacaaaatgagtggcacggtattgaaacggacggattcaaggaatgggcgacgcagtccctgccctggtga

SEQ ID NO: 3269 - DNA, 2154 bp, Artificial Sequence
  Optimized genes for Lactococcus lactis
atgaaaattaataagattgacactcgacacggtacggccaaccaatctacattttctcacgggaattgcttgccctatactggtttcccgtggggtatgaattatttttctccatcaacgggagccgcccgaggggcctggtggttccatccagaggatcgtacgtttgaagggtatcggatcacccaccaaccgtcgccctggatgggcgattttagccacctgactatgactcccgtggccggtcctctacctgagacaagcttatggcatacggtatcctcgtacagacccgaggaatctacgttcaacccgactcagctaaaaatcacacagctacgttaccaaatcacttcccaattaataccttcaatgtatggagggatattatctatgaactatcaaaatctgagcctaaaagacaatggcttgatgctgcatctacctggatcctacgagttacaacagctcgatgactacagtctcgagctaagcataataaacttcgcgggatgtgaggatgagaacttcacattttatctcaagttcacagctgaccaacctttcgtattgagtggaaatctcagcgacgaggactcgtccgttcggttggattttaaagcagcaaaacaagtacaaatacattttgcaaccagctttatctcaaaggagcaagctgcactaaacctagaaagggagcaggacaactccgccgagacctatctagagaatgccgaatcggcttggaacaacctcttcagcaggatcgagattgaacaccacaatcagcaggaagtgtcgaccttttaccacaatttataccgctcattcctctttccccagacgttttatgagtttgatcaagaacatcagaagatacattacgatacctcatcgaaaactgtaaagaagggcccattgtacacaaacaacgggttctgggacacgttccgcactgtttatcccttatactcactaattgccgtggatgagtacggtgacatgcttgaaggcttccttaactcttaccgggccacaggtttcttaccaaagtggctgtcacccgacgaacgcggtcttatgccggggacacttattgatgcagtcattgcggacgccgcttcgaagaacatacggcctgatttaatgccagaattcttagaggctatgaaaaagggtgctacatcccaatctgagaattctaattatgggcggcgtggtacaaaggattatttaaaattaggctatgtcccgttaacacatcacgagagcgttaaccatacgttggattacgcgttctctgactattgtatttcacaggtagccaaacagacaggggacaaggaaatcagtgatttctatgcccatcaggcgaaagactatcagaatatttttgactcggaaacgggctttatgcgggctaaagatgctgacgggaacttcagggctgactttttggatatccggtggggcagagactacgccgaaggttctgcttggcaaacttcttggtcagttcttcacgactttgcagggctaataaagctacatggttcacgcgagaattttgagaataagcttattgaactctgtaaccagaggccaaattttaacgtggagggatacggattcgaaatacacgaaatgagcgaaatggctgcaatcgaattcggacaggtagctatcagtaaccaacccagcttccattatccctatctattcagttacataggtaaaccctggatggccacccctctgattaaaaacctcctcactgagacattcaacgattcacccaagggttaccctggtgacgaagacaatggtaccatggccgcctggtatatattttcttcgcttggtttctatccggtgacggccgcttccaatcaatatgtactgggtataccactatgggacaaggcccggataaatttgagctcaggccaacagctgactatccttgctgagccgaatgcgccgcaacaagtgtttgtcaatcaaataaccttcaccgacaaaaaggtgaatgatacttttataaaacacgaggagttgattaaaggtggcaccctgaaatttgatttgggcattgttcctaacccgttgaaatatacaaacgaacaattgccgtattctttgaccgaaaactga

SEQ ID NO: 3270 - DNA, 402 bp, Artificial Sequence
  Optimized genes for Lactococcus lactis
atgaataaaaaggagttggagaatgcgctcatatttccccaaggtgaaaaaaatccatatggagcctactttaccggccagagctatttagaagggatgatagctgataaggaccttccctttggtgttggcaacgtgacattcgaaccgggctgtcgtaatcattggcacattcacaaggatggctatcaagtgctactggtaaccgcaggtgagggttggtatcaggaagaagggaaagaagcacaattactccacgctggtgatacaattgttacacacgctggcgttaagcattggcacggcgccacaaaagactcatggttttcccatgtcgccatcaccgctggtgaggcggtatggctggaagaagttagcgatgagcaatatgagaatctatga

SEQ ID NO: 3271 - DNA, 753 bp, Artificial Sequence
  Optimized genes for Lactococcus lactis
atgtcaaataatatcgaaaataaagtcgtcctcataactggtgctagcagtggaattggacaagccaccgcggaacttctggccaaaaagggggcaaaaatagttctcgcggcaagacgtgagaatcggttacaagagttagcagataagattaaaaaagcgggaggacaggccatatatcaagttaccgatgtaactaacccagaagaaagtaaaaaattagtacaatatgccaaagaaaactttggtaaaatcgatgcaatttttcttaatgcaggtattatgccctcctcccccctctccgcactgcatgtggaggagtgggagaatatggtggacattaatcttaaaggtgttttgaacggtctagcagccgttcttccagagtttaccgcgcagaagagtggtcatgtaataaccacaagcagcgtcgctggattgaaagcgtatcccaacggtggagtctatggtgcgaccaaatgggcagtacgcgagttgatggaggttctgcgcatggaatccgcacaagaaggcacacatattcggacagctaccatatatcctgcagccataaatacagaactgcttaacactataacagataaagacgccgcagagggcatgactgccctgtatgaacaatatggtatttcgccggaggcgatcgcacgcatagtagcgtttgcattagaacagcctgaagatgtgaatgtttccgaattcacagttggacccactacgcagccctggtag

SEQ ID NO: 3272 - DNA, 1047 bp, Artificial Sequence
  Optimized genes for Lactococcus lactis
atgaagtctgtgtatttcgttgaaaagaacaaaatgcaagttagggaatttcctaaggcacagctagtaaaagagaccgacgcaatcatcaagatagtacgtgcatgcgtttgcggatcggacctttggtggtttagggggataagcgaacggcagcctggacctgtcggtcacgaggcaataggccttatcgaggaggttggtacaggagtaaagaacttcaaagtaggagatttcgtgatcgtaccttttacccacggatgcggccattgcccgatctgcttagccggcttcgaggcaaactgtcccaacgcaaaggatggtgtcaatggaggataccagggtgagttctatagagccataaatacggacggagcacttgtcaagataccaggtcaacctagcgattacagtgacgaccaacttgccagccttactgctctggctgatgtgatgccgaccggcttccatgctgcaaaggcggcggatgtccacgaaggcgacacagtggttgttttcggcgacggcgccgtaggactttgtgccgtcatctccgcgaaactgttaggtgctaaacggattattgccatgtcaaggcacgaggatcgcgctgcgctcgcacgggattttggagctacggacatcattgacgagcggggagaagaggccattcaaaagataatgagtttgacaaacggatacggtgcggatgcagctttagaatgtgtgggtaccaaacaagcgatagaatcggctttccaagccgttagggcaggaggaagggtaggaagagtcggcgtcccacacgatgtagactacaatgagtggattgatagcctattttggaagaatatacaacttggaggaggggtcgctagcgtagctcgctgggacaaagagatccttctcgaggccgtactgtcaggggagatcaacccagggcgtgtgtttacggcggagttcagtctagatgagattcagaaagcctatgaggcaatggatcagcggaccgcaattaaatcattgcttagaatatcagaggtctag

SEQ ID NO: 3273 - DNA, 165 bp, Artificial Sequence
  Optimized genes for Lactococcus lactis
atgacgagccagaatgagggggtagtcgaggccgagataaagaatttcgggaggcagatgataatcgaaggagaaatccacgagtgcgaactaaattggaataaaacttggttgatcgagaattgcatgacacaggcaggggccttttcgttaggatttttttga

SEQ ID NO: 3274 - DNA, 600 bp, Artificial Sequence
  Optimized genes for Lactococcus lactis
atgaaactttccaaagttgccatctctactgggctcgtcgcgtcgttcatgtttatcggcggagggattgcccacgcagacaccccaaagtcaacacacgaggtcgcaattgaagtgataaacggcaattacggtaatggggatactcgagtaaccaatttgcaatcgaagggttttgatgttaaagcaattcaaactgaggtaaacaatatcctcactggtaccaccacacaggttagtgctacaacaaaaaccgcggaggagcaacctactaaagtgacatcggtcgctccaactcaggcaacccaatcagtgagcggagggttaaacatgtctcaaactagcggccaggttgatatacaagcccttgctaattatatggcatcgaataccgctaacgctgcaggttactctgcgtctgagtgggcatatatcatcacccacgaatcgaacggtggtattgatagtgtcaatagttcatccggcgcttatggggcgttccaattactgggtcatggggagtatgccggaatgacgctcgccgaacaaattgcaatggcctccaaacttcctgcgggttcttgggttgtctataactaa

SEQ ID NO: 3275 - DNA, 1539 bp, Artificial Sequence
  Optimized genes for Lactococcus lactis
atgaagttaaaggatattgaaaaatcgaccaataaaaatctatacctcttatttctgagcgtcctcgtcggcctaactgccgggttccttgcctcactctatcgtcttgccttagagaaagccgaaacgtggggactttcaatctaccgctttgtatcgtcccacttaatattcatcccgctactgatcctgggcttggctttccttgcttttgtagttacgtttttcatgaaaaagtatccgatgtcgtcgggcagtgggattccgcaggtcaagggtcaactccagggctatttcaaaaacaattggttcacgacagcattcgcgaaatttatagcggggaccctcgctatgttcgccgggctgagtctgggacgcgaaggaccttccgttcaacttggtgcatccatgggccaaatggtaagtagtcggctggcggagaccgagcgccacaaacgtatccttatcgcatctggagcatcagcagggctgtctgctgcgtttaacgcgcccttatccggagtaatgtttaccttagaagaggtatttaagtacttctccccactgatccttcttacatgtatgactagtgcgatggtcgccgatatggtggcccgaattatgtttgggtccggaccagtcttccattttcaaatagtgggatctatcgaactgagcaactactggctacttattatcttagggatcatactaggatttttcggcgcattctacaattggaccctgttgacgagccagaatttgatgaaaaaaataaagagtccatttttacgagtattattaacttttctcgttgtcggtgctactggcctactgttccccaatatcataggttcaggacacaggctcatggactccttctcattagggatgggattggcattcctttgccttattctcattggaaaatacttgattagcatggtttcgtatgcttctggagttcctggaggaatcttcttccccctcttagtcctcggcgcctccttaggtgccgtttttgccactattgtcatatcactatttcatttaccctcccacctcttcgcaaacttggttattttagcaatggcaggcacgttcacggctattgtacgtgcaccgatgacggggatactcctccttgtagaaatgactgggtcctttgatcacctgttgccgcttgcgctagtgtcattgattgcttatgtcgtcgctgacttacttcagtccgagcccatctacgactccctgctagacaatatgctaaaagaaaaggagattgatgttgacgatagcgataaacaaatgatgttcgagactattgtccagttcgattcggttgcggatcgtaaaaagctttcagaaatccatctccctgaaggctgtctgttagtatcggttcaccgtagtgggaaggatatcatcccccatgggaacactgaactacaagccggggattatttaacatttttgatccggagagaagatgaggtgatcgcgagggagcaattacgtcaggttttgaacgaaaaatag

SEQ ID NO: 3276 - DNA, 270 bp, Artificial Sequence
  Optimized genes for Lactococcus lactis
atgcttctcagcatcgccatcttgctaataatctggggcgcctacctgattggtaagaaatataaagactcattctttatttcatatggtcgttcaaaacgcggcctaataataatagtcagcagcttattgcttctttcgttcttcgtgttcgtaaagaacgatagcctttttcctgtggtcctgttttcaattttcttaatcgggctgggtatatactaccttattcatgatagcaagcgggacagcgagggcaaaaaggaaaattaa

SEQ ID NO: 3277 - DNA, 267 bp, Artificial Sequence
  Optimized genes for Lactococcus lactis
atgaaaaaggttctagtgaaagctgtgcacgggtatcaacggtggatctcaccagccttgccgccagcctgtcgttattacccgacgtgtagcaactatatggtccaggccattgaaaaacacggtcccgcgaagggactagctatgggcactgcaagaatactgaggtgccatccgttttgccagcccggatacgatttagtccctgatcacttttctttgcggcgtaactgggcagaacctgagaaggaagaggatagtaactaa

SEQ ID NO: 3278 - DNA, 714 bp, Artificial Sequence
  Optimized genes for Lactococcus lactis
atgaaaaatatgaatgacaataatgtgatctttgatcagaggagtgacggactaaacgcgttctttagcaaaatctatgcgctgatgggtgcgggggtgctagtgtccgccttggtatcttggataatgatcacctttttcttagacaacatgacagctattttacagtccggcagtctcttttttctggtgctctggatcatccccctggtaatggtagtttctttacaaggtctcgcaatgaaaaactcgaaaatggcgctacctatttttataggatatgcagccttcatgggttttttgatttctttcacacttttaatgtataccgctacggacatcaccctggcatttgtgaccgctgcagctatgttctttggactatctgtgtatgggagattcacaaaacgcaatctgtctgctatgggaaaagcattcggtgtcgcagtgtggggcctgatcatcgctatgtttttgaacttcttctttgcatccacagggcttacaatacttatatcgttagttggtgtggtaatttttgctggtttaatcgcgtgggataaccagaagataacacaggtgtacaatgctaacaacgggcaagtgtcagatgggtgggccataagcatggcactaagtctgtatcttgatttcattaatatgttcttgttcttattaagattatttggtatagcgggtgggaatcgagactga

SEQ ID NO: 3279 - DNA, 933 bp, Artificial Sequence
  Optimized genes for Lactococcus lactis
atgacgttgaagatcgacaaagtgcgcaaatcatttggggataagattgcagttgataacctcaatatggtggtcaagccgggagaagtaatgggcctaattgggcaaaatggagcggggaaaaccactactttccgcatgatcctgaattttatatctgctgatcagggaaagattacatggcaggatggcccaataacgcaggaaataaagcagaaaatcggctttctcccggaggagcgtggcctctatcaaaagatgactgttgaggaccaaattttgtatttcgccgaattgcatggaatgaagcgtgctgatgcaagaataaagctccaagattggatgaagcgcctcgaagttgtgggaaagcccacggataaggtacaaaccctctccaagggtaatgcacagaaaatacagtttattgcaactttgatccatgagccggagtttctcatcttagacgagccgtttaccggacttgaccctgtcaacacggaattgctgagaaacgagattaaacggagtcgtgacaagggagcagcggtaatcttttcgaaccataatatgtccgatgtagagctgctttccgatcacttgttaatgctaaagggcggacagacaatccttaatgggactgtagaagctataagggcgtcatatgggaggacccgaatctatttggaatctgatttaccgaacgaagagctgtccgtgataacaggagtcgagtccatcgaaaagcgtggatcgggtagaagcatcaagatatcagaggcggaggtgggcagagagatattccaaaaagttgctaaggatggatatgtgcaagcctttgtccagtccccccctagccttgacgaaatttttagaatggaagctgcggagaataatcaagagaatctaagcgcacgtagcgaggagatcaaatag

SEQ ID NO: 3280 - DNA, 399 bp, Artificial Sequence
  Optimized genes for Lactococcus lactis
atgaacaagtttatttggagcatattcataccagtcttaatttttgccggattgcttacagttattgggttctccctcgagagccagcatttttattggctgcagtcggtagagttaatatacctattcgggtctctgattttcacattcgcggcattttggatttggcatttggggattaagtcacggaagatgaaatctttaaaagtactctggctaattctgagtctagtcttcctaatagatctaataaatactggggtctatctcgctcagggccaagggtggctctggggtatgtcttcattttcctcagcgggaccggccttttttgcttcgatgttgttgctctctctgagtttcctgggattccgtgggcaaatgaagaaagagaactaa

SEQ ID NO: 3281 - DNA, 909 bp, Artificial Sequence
  Optimized genes for Lactococcus lactis
atgacgtattatttgcttgctaatccgaattccggagctggaaagggcgctaggaccctagagactctcatcccgtacctagagaagaataattacgagtatcgcctgttcaagactaaggctgcgggcgaggaaggagcactagttcggcaaatactggacttaaaaaaccccgacgaccatctcgtgatcattggcggtgacggtacgatctcgttagtaattaacgagctgccggaggaggaagcgttcagttatattccctcaggctcaggaaacgacttcgcacgctccctaaaactgaaactggatccgatagagtcctttgaagccgctcgccgcgggatcaaccatgaaatatttattatgaactaccaatcgaaaggtctttctggttatgccctaaacaacatcggcatagggcttgacgccaccatagtaaaaagtgctaacgaaggcaaattgaagcaagttctaaataagctgaagcttgggtctttctcctatatactcactgccctccacgtgctcattactaagaaaccttttccggcactaatagaagtggagaaccaggaaatatcgctagagaacgcttttctcatgacattcaccaaacatccatattttggaggaggtgttaagatcagccctgaggctaccaacgaaaatgcggatatacacctcgttgaatacaataagcaccatctactgcggactttttccttaatccccagcgtcttacgtgggatgcatttaaaacatcctttgtttttgcatcgtgtgagcccgcagttcagcgtagaactggcagagtcgcagccagtccaaattgatggagagattcatgaactagttgcagccgaccgactgagcatttcaacggagcgcaggatgatcatatactga

SEQ ID NO: 3282 - DNA, 588 bp, Artificial Sequence
  Optimized genes for Lactococcus lactis
atgacgataaatactaataatctaacgatcaccatatccgcagcaagcaagaagcaatacccggaaaatgactggccggagatagcactcgccggccgctccaacgttggtaagtcctctttcatcaatacgctgcttaatcgcaagaactttgcgcgcacgtctggtcagccgggtaaaactcagttattgaatttttacaatatagatgaccaactccatttcgttgatgttcccgggtatgggtatgctcgggtgtcaaaaaaggagcgggaaaaatggggtaagatgatcgaggagtatctgaccacccgagaaaatcttaaggctgttgtaagtctggtcgatattcgtcatgaaccgtcagaggacgacttgatgatgtatgaattcctaaagtattatcacatcccagtaatccttgtggccaccaaagcggataaagttccgcgcggtaagtggaacaaacatgaatccattataaagaaagctatgaaattcgacagtaccgatgactttataattttttcgtcaactgacaaaacgggatttgaagaagcttgggaggcgatcttacggtatctatag

SEQ ID NO: 3283 - DNA, 183 bp, Artificial Sequence
  Optimized genes for Lactococcus lactis
atgggcttgacctttcgcaaacgtgacgactttgacaagatgatggacgatctgggggtaagcactgtcgacttagtgacggacgacgataagaagtccgttccatcacccgaaaagaaagaagacccttttgctaaatttctaaccccgaaggaaaacaataaggagaaagatcctaattaa

SEQ ID NO: 3284 - DNA, 927 bp, Artificial Sequence
  Optimized genes for Lactococcus lactis
atgaccctcaattcgctcgatgttcaaaataaaaccttcaacccgcagttccgaggattttcaaaacatgaagttgatgaattcctggacattgtggtgagagattatgatgaatttgctcagactattaaggaccaggagagagagctaaaggctctacgggagcgcgtaaagtatttcgatgacatgaaagattcattgaacaaaagcattgtggtggcgcaagatgcagccgacaatctgcgagagcaagcaaagagcgaggcggacactttgcgcatcaattcggagaaggagtcagctgatattattgcgaatgcaggtcagaaatcttccctgattatcgaggctgccaaaaaggaggcgggttttatactgaacgccgccagtgacgacgcccggaaactggtgcgtgacactgacgatctcaagcgtaagatgcgattgtaccaccaaagaatgacctccataattgagaaccaattagcatcgatacagagcgacgactgggccgaaatcttccgcccaacccaagactacgcaataaacccagaggagaagttacagagcataattgaagaacatctcgaaaatgctgagtcaaccctggctaaaacacaggccataaagcccctgaccgacgaagacatcgctcaggcaaatgaaacctcggacgagacagaaacgatagtctcagaagaaatagtttttgaaactgaagtccccgatgaggttaaggaggaagtagaaattacggatgaagctaacactacggatgattccaacgaggaatctgaagttgaggcgcctaaggctgatgattcagagatcttcccagaacttgactctaaggcccccgcggaaaccgccgaagttgtggagaaggataatcaagagacaattgatctcagcgagttaaaaaactga

SEQ ID NO: 3285 - DNA, 678 bp, Artificial Sequence
  Optimized genes for Lactococcus lactis
atgactattaaggagaacgttaagcgcattttatccaacgtagacgcagctaaggctgcgtcctcatatagtaatcagtccgtttcggtagttgcagtaaccaaatcggttgacgctaatctcgctcgagaggttttcgaaaatggagtgtcacacttggcagagaaccgtaccgagctatttttggaaaaatacgaggcacttaaggatttagagatcacatggcatctgataggtaacctacaaaggcgcaaagtaaagcaagtgattaattatgtggattattttcatgccttagacagcctgaagttagcgcaagaaatcaataagcgtgctgaacatactataaaatgttttattgagttaaatatttctggcgaggagtccaaacatggtttcagtgtcaatgagctcatggaaattttacccgaattctccgagttagaaaatattgagattgtaggcctaatgactatggcacccttcgacgccaccgagagcgaatgtaatgatatcttcggccgcatgaaaaagttgcaagtcgaaatctccgagatgaatttatcacgtatcccatgcaccgagttatctatgggaatgtcccgggactatgaaatagcaataaaaaacggggctacatttgtcaggatcggcaccgaatttttcaaaaacctataa

SEQ ID NO: 3286 - DNA, 522 bp, Artificial Sequence
  Optimized genes for Lactococcus lactis
atgttcgagaagttcgatctgttaaagcatttcggagtctatggagtcgcaattgacaacgagaaactgctggtgatagagaaaaattctggcccgtaccagaatcgttatgacctacccggcgggagtcaagaagtaggagaatccatggttgacacactcgagcgggaggtccttgaggagactggtttcacagtccttgcgagtacgaacaaccgcttgtacagcgcatggatttacgaaaacgataggcgggtggtgggtcatcatatcttcaatttattcgacgttaaattgaattcagtggcgaaaaaactcccacaaatagttgccgacggaaagaacgattctgacagagctgtatggaaatcaataaagaatttgagtgttgaaaactcgtcgcctctcgtactgaaagtaattgctgaaatcaataactatccgcacgtcgataaagcggaaatatatcgtgactggaaggttaattatggaagcaaaaattaccctaagccactagtatag

SEQ ID NO: 3287 - DNA, 714 bp, Artificial Sequence
  Optimized genes for Lactococcus lactis
atgaagaaaattataaccaaagactatgcaacgatgtcggagctggcagcggctattgtgctagataagatgatgctgagtaagcgagttaacttgtccttaactgccgggaatacccctttagggatgtacgagatacttatagataagcttcaaaaaatgaacttcgataggtcaaatatacattactataatttcgacgaagtgcctcttgcaggtgagcggtatggactgactatgtcagccctgaagactgcattttacgacagggtgcacatcgatgacggcaacttgcacgaactcaacgcacagaataaccaagtattcgatcaaaaaatcctccaagatggtggaatcgatttgattgtgatgggtatcggcgaagacggccacttttgcgccaatatgccggggcacacatctttcgaaagagagatttttgcggtaccttttgaggaaggcgatgaaatttatcaaagtataaaaaacctaacggacaaggagcccgcgtcgccgtacgtaactttcggacctcgcacagtgctagcgtcaaagcagttactcgtattcgccgacggtaaaaaaaaagccgagatcatgaaaaaggttctcgaaggacctatcacggaagaaatacccgctagtattctccgcacccacccgaacgtcactttcatcttagatgaggaggccgctgcgcttctagagaactag

SEQ ID NO: 3288 - DNA, 507 bp, Artificial Sequence
  Optimized genes for Lactococcus lactis
atggtacaggaaaacactaagactgaagtgacggaagttaaagggagtttgacttatgaggacaaggtcatacagaaaatagtaggtctcgctctagaatcagttaatgggttattgtctgtcgacgggggtttcttctcgaacctgacaggtaagctagtaaatacagacgacgtaacggccggagtgggagttgaggtagggaaaaagcaggtagccgtggacctaaaagttgttactgagtacaaaaagaacgttccggacatttatcggaaaataaaagacgtcatccgtaaagaggtatcagacatgacggacttagaagtggtagaggtaaatgtcactgttgtcgatataaagaccaaagagcagcagaaggatgatgaaaagagtctccaggatcgcgttgtcggtgcagctcaaaccacaggtaagttcacatctgatcaagttgataaggtaaaggaaaaggttgacgatatgggcgatgatgctagagttaagtag

SEQ ID NO: 3289 - DNA, 1005 bp, Artificial Sequence
  Optimized genes for Lactococcus lactis
atgatcttgagtgtactacccagcaatcttttaggggttactaaggttaatgctgaatcgtcgcaaaccgaagtaaaccaagagctaactaatttccaaaccgagctagactctaagttggctcaagccaacaagatttacagccaagcacaagaagcgcaggagaaggtaaaacaaagcaagtcaaaaataaccgagtacgagagtaaaattgccgaaactgaaaacgatatagtgcaactgaaagcatctgtggcaaaacaaatgagagctgtacagagcaacgggggagcgacttttagttatatcgacgtcgtcgcatcctccaagaacttgtcggaaatgatcacaagacttacgaatttgaatgtggtgcttacggccgaagcggaccaggcgaagtcgctaatagagaaggaagcttctctaaaaacaatgaaagttaagttagaggagacgcaggaatctttagtaaaaaatcagaacgactatcagggacaagtagatagtttacaatcttccatttcctcattgaaagataagatttcaagtaataagcaactcctatcggaaatgcaggagaaagctgcagcggagcagaaagcgagggatgaagccttggcgaaatctgttgccgaggtaaaagctaaagcggagaccgtaaagaacaccagctcgaacccgccgaccgtcccagaccccccgaagcagaccacacctaccaccccatcagggggccgcactctgaatgtggaggccacggcttatgcactcaacggtattacagcaacagggattgatttgtccaagaacccgatctgtatagcggtagatccctcagttataccactaaatagcttagttgaagttccaggctatggaatcgcaattgccggagataccgggggtgctataatagggaatattatcgacgtccatttccccacaaatgaccaagcgatcgcttggggacgcaaaaacattcagatcaccgtccttagttaa

SEQ ID NO: 3290 - DNA, 576 bp, Artificial Sequence
  Optimized genes for Lactococcus lactis
atgaagagcaaaaaaacccttataggtcttatgacgagcgtaaccttcttggtgttcgcgacaccactgatggttaacgctgacactgacagctcaactcaaagtaacaaccaggttccacagatcgtaatcgagaacgtagacaactccctagtaagtaccgtcgatgtcctcgattccagcgagtcagcagtcttcgatcctacaattctgccggtgagtggcgcggtccaaacgattaaggacaagaatggggccgtctcaaacatctccttgacacccctcttcaatcctcgcacgagagtatctaatggatcgtatacgatcaacgcttggggaattggctggaacgttacctattatatcaatataagcagcaacaagattacctctgcgaataatttagattatatcattgccatgccagtaaatagtgcgacagtgaccgttgacagtagcaaacaggccactgcgcggttttccttttcaactcccatatacaacattctttcatggacggggtgggtacgcgctacgattaacagttctaacaacattgtcatcacgacaaattag

SEQ ID NO: 3291 - DNA, 1233 bp, Artificial Sequence
  Optimized genes for Lactococcus lactis
atgccgaacggccttacggtgtattaccttcccaaggctgattataatcggacttacggcctcttcacaactaattttggctcgcttgacacctcctttgtcccgctaggtgaaagcgaatttcagacgtttccagaggggatcgctcactttctcgagcataaattgtttgagaaagaggagggggacgtaatgtacaaatttggcgcccttggggcccagacaaacgcctttaccagctttagtcgcacgagctatctattttccacgagggaaaattcatatgagtgtactgaactcttacttgattttgtgcagaagccgtatttcacaaaggaaaatgtggagaaagagcagggtattattcaacaggaaattcaaatgtaccaggacgactccgactggcgtctttttgcaggcctacttgagaaaatgtatccggattcacctcttgcagccgacatcgccggcaccccagctaccattaacgcaatcacggctgacgacctctacaagaactacgaggtattctaccatcccaagaacatgaatctgtttctgaccggacccttcgacatagaaatgatgtcggattttgtcagatcgaatcaggcgaagaaggactttgctgacttgtcagagatacagcgtaaggaaattaaagcatctgagccgataagcggagagtcccttgaactcgaggtggcaatgcctaaatttgccttgggattacgaggcgaggaccagcttagttccgacagcaaaacgctattcaagtacaaactagcaaatcagctttttctcgacctattgttcgggagaaccagtcagcgctatgaggaactttataacagcggcctgatcgatgactcgttcgggttttcatttgaccttgataagcggttccacttcgcagttctcacagccgatacagaaaatccgcaaatcctaggccagacattacaagaagccatcaaatcttataaaattgatcgggatttttcagaggagcatttagaccttctaaaacgtgaaatgttaggagactacttttcgagtctgaacagcttggagtacatagcgaatcaatttagctctgaaatatacggtgacctaacgttcttcgatttcccggaaatattgaaagagttgagcctttcagaaattgaaaaattcgcggatcagttcatatcggagatgaagaaggtcgagttcacgattttgcccaagtga

SEQ ID NO: 3292 - DNA, 282 bp, Artificial Sequence
  Optimized genes for Lactococcus lactis
atggagttaaaaaacctaaaggacttttacgagaagcaagagtacgtagattacaatgaatcaaaaaattttgaacaaagacaggtgaataagagaatcgaggagctatcctttttcacaaacatcgctgtgttttcaatttttctagtcttcacaacttatattctcgtgagcctcctcgcttcttggatcgcaatcccagtgtctatagtgttatcattggcgttatacataagtgtcaagaaagggatcgcgaaggccatcaagttcatgatgaagtaa

SEQ ID NO: 3293 - DNA, 594 bp, Artificial Sequence
  Optimized genes for Lactococcus lactis
atggtcgagcgacgagtagtcttcccggttattggggacgatgaagcactacagaaagatacgagggtcatatttacaaaccaacagctactgacacgtaacccatcactgcaggacgaagccagtatagaaaataacaagccaaagaccgatgctaaacgtcctgagagtttcaagccgtataaagcgaaaactagttttagcacccagcaccgtcctcttaattcgaaccatgatggcgtttcatcatacgacaaaatgcccaagaagactagtgttgatgagtctaaggagcgagcaaagcgagctgcagcgacgctaccaaaaccccccaagcagtatgttagcccattggaacgagacaaggaagacattacggtacgcagatcgacctcagcgatcctaaacaaaaggccctcagctaatgacaatcctatacgcgatatgaaaaatcagggcatgaatgtcagcgacgccgtcgcgaagggaggtatgaaaaaggctgtcccccacggggccgctgcaaacgatactcagaaggggtcgtacttcgagaataaaaggaagaatatattcgaccgtggcattgtataa

SEQ ID NO: 3294 - DNA, 4353 bp, Artificial Sequence
  Optimized genes for Lactococcus lactis
atgattaaaaaatggaccgtatgtctcagcattattatcttagtgctgaattttgtaccgaatttgctgcagggtcaccaggtatttgcagagaatcagaagaattataaagacaaggttgagcttataaatgacgaaagctttaatatctcgtacagcatgcaagcccttgaaaaccaatacgaatgggagattgactatagaattaacaagaccgaaaatgataaggagttgaagctcaaattctcgttcgagggcaaccagcccatagagatagaagagaacgaatcatggactttaaaggaaaagaacacaattatctcagatttcgaaaaagagaatgaaggaaagattgtactccgagccaacaattctattagtctcctaaacttggaaatacaggcagacgcaaaacttatagaaaacgaccaggaagtcatctctgaagacattcttgccaaaaaggagtctactattttctctctatacataccggagaacaataaggctgattctaaagaaaaggataataagaacactgaggaggtgttaaacaacgaatccagtcaagaagaaaccgtgtcccaactcaagaaggactcacaactggcattttcttacccgtccaattttgggatcaaagcgtcattcaacgatctagctcaaaattacgaaaacattagcccagaatatcggcaggacgaaacgggcatatcacctaaccacagctggatcccgacagggaatactacggtcgtgaaccaccagggttggaactctttcagtagccaatgggacggggtaaactcctggaacggagaggctacaaacctagaaaactcgtatatagagtacgccggcgtaaacaatccagtcgactttgcattgcgaaaatacgccaaggagacagagactcccggactatatgatgtctaccttaatgtaaggggaaacgtccagaaccctatcaagccagttgacatagtcttagttattgacatgtctggttctatgcagggagctaaagaaacggctgtacgacagggtgttagtgactttctaagcacgatccagaatactgcttacgcagactatgttaatgttggcatcgtgggatattcgagcccgggtaactatgtgactggcgcctctgggtatatcacagttccaatagataaggtcagctccgagtcacatgtcaagtcgatcaaccaagcgctggcaccgcagtttagtgggggtacattcacccaactaggcttgcgtaaagggacagaaatgttagagcaagactcgtctgataatcaaaaaatgatgattctgatgacagacggggttccaacgttcagttataaggtcaactctgccagtaaagtagataatgtcatatacggtcaaagctttgccgaatcccgagacgagccggggaatacgtcgaagatccaatcgccatactatgttaaggatatcaatggtggtagcaatattgaaatacgggatacctgggcggctacattaggcgaagcggaaatcagtaaacaggagatctctgagattcacactcttgggatacaactgggaaatgacggtagctacttatcccaagaagaagtcaagtcccgtacaagtctaattgcaacgacagggctgtaccaggatgcaaattctgctaatgacataactgactacttaaagaatcaggcgaatgtagtactctctcgatttaatacaataactaatggattaatcctcgaccctttgggagctcaattcgaatataaagacactaaatttgaaattacctcggttggtgaggactcgatcgataatcttccgacgggaaaaatcaatgagaagggcttagaaatctccaacttaaacataggcaagaaccaggaagttcaaatacactatcaagtccgtttgaatacggaaaccgatgactttaaaacaaactactggtaccaaatgaatggtgaaacgactctcacccccaatggctctaacccggacaacaaggtcaacttcggtgttccatccgccaaaagctcaggaattaacctcacattggaaaaacaatggctagcgaactcagaaaatatcccagaaaacgtcgagctgttgatcggtcggcgatctgcgcagatctcttctgactggacaaaaaccgtgacactaaaggaggatgatgaatggcgttctcagttagaaaatttacctaaatattcgatcttaggcgaggagttcatttacgagataaaggacgagatcgtacttaacagcgagatatacgattggatcaccataggagaagataagacgactatcgcaaatatagagaaattcagactacagctgataaagacatcgaatcacgataacgaaccgctatccgaggtggaattcgtcctcaagaactcacagggcgaggagatcgacaaagcggtaaccaatgaaaagggcgagatactatttgataagactcgtttaaactacggggaagaataccagttacatgaaatcaagagccctggtcactccctcgaaggtccttggaagatcaaaacggagtttgaaaatgggcagcctattataaaggtagacggggaacaaattgctttagacgagcattacaacaaattcatgatatcactgaatatcactaacgatattaacgtggaggaattccggaattcggttactatagataagcgggcggtggatagcgaggaaaaactagatggggcagtgtttaatctatatcagatagaatctgtggatgatgaactgacccaactcaagcccttggagataactaacaacctgcttcccggcttgtacgcacttcaagaaagtgtgtcccccaatgggtattatcgtgatgacgaggtgcacttcttccgtgtcaagttcaatgggagtatagtggcaataggcagtgagggtatcgatatcccattcttggatgagaatgaatcggggaaaaacggtcttgttttgaatgaggaagagaatggcgatttacacctgacactgattttctacaaccaagcagtgcccccactacagctagaggtggataagatagacgatgacttcacttcgcccttagcgggggtatcttttgaattgactaggttgggccgcaaatctaccgacagtgatagtgtgaagcgtataaactcatttgacaggatacttaaaactttcaacaatgagttcactggcgagaccatcgcgctgaagagtaacttagatggcaaactgaccgtcatagataatgaaaacaacgggcaggagtcaacgagccccataagtcttgagtatgacacgcaatataaattggttaagaaatcgtctatcggtctcttcccgaattttggggagactagtcagtggatcataaccacacccaacatggacgaactgaaagaacatgaggaggataacaatattgagatagatggtggggacctactggaaacccccgacgaatcaatattagaatctatcaaccaaacaccttccaccttgggcgtggtgtcactcattaagacgaaaaatcccgagttcaaggccctagagagcaccgattcacaagtggaaaaggttaaatcagattcgtcatttcaggagaaaatctcggaatatttaatctcattcgaaattcattctaacattacgcattctttcaccatcaaaaaggtagatggtgagtctaatcgtccaatggatacgcagtttgctctaagatgggtagagaagttcgagcctacccaagatttcgattcgctagagcggttgaacctggacacgctagacttatctggaaacgatatatcgacttcgtcgaagacaagcatcgacgcgaaagccggcgccacattatctactgagaagggatcccgtacccttgaacacatggcgcgaggcaacttatatataatcagtgaagaagaggtccccactggttaccagaagaccaacaccgtaatcgtagcctatatggacaaagcccaggggtacgctgataaagcgactatccatattcggctcgccaaaagatcagcgactcatcctgagatattggagttcgggagccttgaagacttcaaagagtataagggcgacttagaggacgagatcgggatagtcttcgcaaactacaagatcgcggaaggcggctcggaagaaaaggaaaaggaaaaggaagagaataacgagatgcggaacaagcaggagacaaacaaacctaacatagaattgccggctttgggtgccataggcgtgggcggcgtgggcttgttattaatcatatcggcgtacctattaaagaagtaccggggtaaataa

SEQ ID NO: 3295 - DNA, 780 bp, Artificial Sequence
  Optimized genes for Lactococcus lactis
atgtcagaaataatcaaccatattactgctttccaaccggtatatcgtgtccttaatagggaagaaaatttggacttttaccgggaagtcctaggattcaaggtgttggtggaagaaggagcgatggtttggttagggggacacgaggccaagaaggatcgcttccaacttgaggaatcaccaggattccggcccgttgaaggcctgaaaaagcacggccagactgtaattaaagcaaatagttcggagattgaacagctcatagtgcgaaatttagataaaatctcgaaagtatataaaggaaaaaacgggttcgcgttttctgccttgagcccagaagccgagttatttttggtgaccagcgatttgcttacagatttaagctccttgacagaaattgacaaatcagagattgagttggaggaagataaaacgtttaagggtttaagcgactttgagattattgctatggacttgaatgttgcagatcaatcaatcattgaattctacgagtcggtcttcggcctaaaggcgataaacaaccagatcgaattcccgttcgtcacactcaccttcagcgttgaggaaagtgaagacctggcagctggcaccgacgaggtactagacctggaattcctagtatttatgatcgataaagactttgacttgaaggatttcgcgcaccagttctccgatgttgatggtacatacttagacggttccgcgaaaaccttctctctggaagtacccgatcacgttgaactttggttcgtgaagtga

SEQ ID NO: 3296 - DNA, 843 bp, Artificial Sequence
  Optimized genes for Lactococcus lactis
atgaagaaaataaagttgttgaccctagccactgtaggtattgcctcaataggccttctagcagcatgttcttcgaaagacaatagttcatctaaaagcaccgacaaagttacgacggtaacagtggcgacaagcgctgcgtctgtgccatacgagtattcagagaacgggaaaatgactggctttgagtacgatatacttaaagcggccgacaaggatatgaaggattataagttcgattttaaagtctacgaagattccgcaatattagcagcattagatggcgggagagcacaaatcgcggcaaataacttcggcaagactaaagcccgatctgagaagtatctcttctcctatcccgtccgacagggcattgatgcaatcttttcaaccagtaaggagaatatcacgaagatttcccagctcgcgggaaagacaacagagataccagcgggaaccaattatggcgacatgtttgagtcctggaataaaaaccatccagataaaaagataaatgtcaaatattctcaacgtccactggccgacagattgtctgcaatttcgtctggtcagatcgattttctgttcgcctcgaaagcaccggcggagaacttgattaaagagcatgcgatcacaggacttgttgacaccgtgcccacggatctggataaacaaccagagtttaagacctacgattattttatcctggataacagccaaagcaagcttcaaaaagacctaaatgttgagctcaaaaagctgtacgataacggtacattaaagaagctatccgagcaatacttccatgactctcatattcccgcagctgatcaattcaagtag

SEQ ID NO: 3297 - DNA, 495 bp, Artificial Sequence
  Optimized genes for Lactococcus lactis
atgaatgaaataacatatacacaaataatgcccaacgacatcgatgacgtcatacgcatcgagagagcgacattcagcgaaaatgaagcactaagtgttgagtccatgatagagaggattaatctaatacccgactcttttattgcagcacgtaattccgaaggaaccgttgttgggtacgtaagcgggcctgtcacggaaggacgctatttggacgacgaaagcttcgaacgtactgaggctaatcctaagacaggtggcttccagaagatcatctcactcactgtagaccctgattatcaaggactcggcatcgccacgaatcttttactactcttggagaaggaagcgaaatccaaaaagaggctaggaatctcgctgacttgtcacgattacctagtcccctattatgaaaagcatggctttacgaatgaaggactaagcgagtcgaagtttggaggagaaacttggtataacatggttatggaattttag

SEQ ID NO: 3298 - DNA, 1086 bp, Artificial Sequence
  Optimized genes for Lactococcus lactis
atgagaagatggattattcatctcgtaatgactgttattggagctagccttggtgtggcggtcgtcccgtccatactcaaggttttcggatgggatactggcatcctccagaacgaagcagtagatgccgttataggggctataatcttcataatcctttcgtttatattcgctggaagtatgcttaacggcttaaagaaaatagactcacgaatttcgaaaatgaatatgtcgaagatggtgttcaacattatagggatcgtccttggtcttctagtcggtgtcatcgggtctataccgttacggttccttaacgtcccaatcctctcaaatatcatcagcttcatactagtgttagtcatgatatatttgggatatgtcctgttcgatagacggggcgacgagatagcacgggtcttattcagaaaacgtagagaagctatggcgacggagccggcagaagtcgccgaggaggtggtaggagaaagcaaatccgacaattcgatactcctagacacctcttctataattgacggtcggattttggacgtgataaaaactggcttcataagcgataagataatcgttcctaattttgttattttggaattgcagcttatttccgatagttccgatcctttgaagagagccaaggggcgacgtgggctagaccttgtaaatgaattgaccaaatttgaccaggtcgaaatatcccaggtggactttgctgatgtgagggaagtcgataccaaactgttaaagtacgcatctagcaccggctccaagctggtgacgaacgactttaatttgaataaagttgccgaaatacaaggcgtgcaagttctaaacatcaacgacctagccaatgccgtcaaaacacaactggtcgtaggcgagcatattaacgtacaaattatacgagcaggctccgagcgccagcaaggggtagcatacctacccgacggaacgatgatagtcatagaggatactgcaaagcttatcgataaaaccgttactgtcgaggtggcgaaggtactacaaacgtcagccgggcgtatgatatttgcagacctagttaaaaaataa

SEQ ID NO: 3299 - DNA, 210 bp, Artificial Sequence
  Optimized genes for Lactococcus lactis
atgaagtacaaacttaatcccctcttcactttacggaagactgataaagccgtttttaacttctcacgagccgagctcacgcagtttaatgacaccgggttcgacattcttctcgcggtccttgaacaggagagtgatcgagagtggaccgatgatgaagacgagttcttaaaagagttaataaaggaaaagatagtcgaagaatcgtga

SEQ ID NO: 3300 - DNA, 474 bp, Artificial Sequence
  Optimized genes for Lactococcus lactis
atgaacaaaaaatcgtccgctttactcacaatgggtaccctcacactcttggcagacggtggggtggtacttacgaatctccctgactcgtttaaaattcagcgggtatatgccgccacctcaagggacataaccgtctatagcaaagacttcctgacttactttcagcggaatgggtcagcggctggatttgattatgatttggccacgtacacccagactctgacgccagacttgggaaatcaagcggggaatgtaacattgaagacaaaagttgacatgtcccagaatttcaccttcaccggtcaaattaacctcggaaacaaaagccaacagaatggcggagcagacggcgtcggtttcctttttcatcccggtgatacttccgtcgtcggagcacccggcggtgctgcgggtctcgtggttttgatggagcacctagtcctgtcctggatcctaacaatcatggagtaa

SEQ ID NO: 3301 - DNA, 309 bp, Artificial Sequence
  Optimized genes for Lactococcus lactis
atggcgttcagtaatactcgtagaaggtatgcgtcttttgataccgtggcatctattccgggcgaggttatagatgcgttttggtttatcattgaccaccacctgaaaggagtatttccactggagacaattattaatttcgacttagtgaattcaggcaatctgctatcgatacggttcagtcaagataacagtcccactacaatcttagtagattttggttatccgttcaatccggagtggcccctacactatagggcagtggataacatgggccgggagactatcatgactgccagggaaatgtaa

SEQ ID NO: 3302 - DNA, 441 bp, Artificial Sequence
  Optimized genes for Lactococcus lactis
atgaaccacattcccgtgtttggggaaaagaacgaagaaaaaaactaccaggccagatatggggtatatagcatagttgctcgcgagaataaagaaatatgcttagtccaggcacctaacggcgcctattttcttccaggaggcgaaatagaggcgggggaggatcaagagaaggccctccacagagagctcatggaggaattgggagcaaccgccgaaataggggagtttctagggcaagcggacgagtacttctattcatctcatagagataagtattattacaacccagcgtacatatacaataccaagaacgttcgctttgattccaagccattagaggactttaaccatatatcgtggttcgatccggaaactgccatttcgaaattgaagagggggtcccacaaatggggcgtacaggagtggctaaaaaagtaa

SEQ ID NO: 3303 - DNA, 402 bp, Artificial Sequence
  Optimized genes for Pichia pastoris
atgtctgctccaactgtcgaggttgaggaattgaactggagactggtcgaagttggtagagttgttttgatcaacaacaagttggctgctattgttgacatcattgaccaaaagagagtcttggttgatggtccatctactgatgttgaaagacaagttgctagattgcaagatattgagttgactttcttggtcttggactctgtttccagaggtgacaactctgacgctgtcaaggaggcttgggatgcttctgatatctcttctcaatgggcttcctccgactgggccaaggacattgctcaaaaacagagaagatccgagctgaacgattttgagagattccaagtccaattgttgcagaagcaaagatctttggccattggttctgccgccaaataa

SEQ ID NO: 3304 - DNA, 1422 bp, Artificial Sequence
  Optimized genes for Pichia pastoris
atggttgagggtaatgtcttggtcatttctaacagagttccagttaccatcaagaaaggttccgatggtaactaccaatacaatatgtcttctggtggtcttgtcactgctttgcagggtttgaagcaaaaattccaatggttcggatggccaggtttggaggtcccagctattgaccaagaaaaagttaactctgatttgaaagagaagttcaactgtttcccaatttacttgtccgacgagatcgctgagctgcactacaacggattctccaactccattttgtggcctttgttccactatcatcctggtgagatgaacttcgatgaagctgcttgggctgcctacattgaggctaaccgtcaattctgtaaggtcatcgttggtaagattgctgacaacgatctggtctggatccatgactaccacttgatgttgttgcctcaaatgcttagaagacaaattgatgagcaaggtctgaagaacgttagattgggttttttcttgcacactccattcccttcttctgaaatctacagaatcttgccagtcagaaaggagattttggaaggtgttttgtcttgtgatcttattggtttccatacttacgactatgctagacacttcacttcctctgtcgagagaattctgggttgtagaaccactcctactggattgacctacggttctcacaacgtctccgtcggtgcctatccaatcggtatcgatgttgacaagtttactactggtattaaacaacacttagtccaagagcgtatccactccttgcaaaagagatttggacaaggagtcaagttgattgttggtgtcgacagattggattacatcaagggtgtacctcagaaattgcatgcttttgaaattttccttcaggagcacccagaatggattggaaaggttgttctggttcaagttgctgttccttccagaggtgacgttgaagagtaccagactttgagagctactgttaatgagttggttggaagaatcaacggtcaatttggtactattgaatttgtccctattcatttcatgcacaagtctgttcctttcgaagaattgatctcattgtacgccgtttctgacatctgtttggtctcttccaccagagacggtatgaacttggtttcttacgagtatatcgcttgtcaacaacagaagaagggatctctgattctttctgagtttgctggtgctgctcaatctttgaacggtgcaattgtcgtcaacccatggaacactgaggaactttccgaagccatttatgaggccctgtctcttccagaggagaaaagagagtcttcatttgagtccatgttcaagtatatttccaagtacactgccgcttactggggtgaaaactttgttaaggaattgactagagtcggaaacaacatgtaa

SEQ ID NO: 3305 - DNA, 2691 bp, Artificial Sequence
  Optimized genes for Pichia pastoris
atgtcagctgaggaaccaaccaaagagaagattccaatcaaccactctgatgatgaggatgaagatatcgaccaattgattgaggatttgcagtccgttcacggttttgacgacgaagaagaggaggagcaccacgaaggagctaccgccaaaccagttccagaagagttgctgcaaactgaccctgcctatggtttaaccactgatgaagtccacaagagaagaaagcgtttcggtgaaaataagatggccgaagaaaaggaaaaccttctggtcaagttctgcatgttcttcgttggtcctatccaattcgtgatggaggccgctgccattcttgcagctggtttggaggactgggtcgatttcggtgtcatccttgctttgcttttcctgaacgcctctgtcggtttcattcaagagtaccaggctggttccattgttgatgagctgaagaagaccttggccaactctgcaacagttatcagagacggtcaagtcgttgatattctagctgacgaggttgtgcctggtgatattctgaaactggaggacggtgttgttattcctgctgatggtagactggtttccgaagaatgttttttgcaagttgaccagtctgctatcacaggagagtctttggctgtggataagaagactggtgactccacttactcctcttcaactgtcaaacgtggtgaggcatacatggttgtcactgccaccggtgactctactttcgtaggaagagctgctgcattggttaacaaagcctccgccggacaaggtcatttcaccgaagttctgaatggtatcggaactatcttattggttttggtaattgcaactttgttggtggtctgggttgcctgtttctacagaacttctcctattgttagaatcctgagattcactcttgccatcaccattgtgggtgttcctgttggacttccagctgtcgttactactacaatggctgttggtgcttcttatttggccaagaagcaagctattgttcaaaagctgtctgccattgaatcattagctggagtcgagatcttgtgttctgacaaaacaggtacattgaccaagaacaagttgtcccttcatgagccttacactgttgaaggtgtagaagctgatgacttgatgctgaccgcttgtttggccgcctcaagaaaaaagaaaggtttggacgctattgacaaggctttcttgaagtctctgatttcctatcctcgtgctaaagctgctctgactaagtacaaggttatcgagttccaaccatttgatccagtctccaagaaagttaccgcctacgtcgaatccccagagggtgagagaattatctgtgttaagggtgccccattgttcgtcttgaaaactgtggaggaagaccatccaattcctgaagatgttcatgataactacgagaacaaggtcgctgagtttgcttcaaggggtttcagatctcttggtgttgctcgtaagagaggtcagggtcactgggagattttgggaattatgccttgtatggacccaccaagagatgacactgctcaaaccgttaatgaggctactcatttgggcttgagagtgaaaatgttgactggagatgctgttggtattgctaaggaaacttgtcgtcaactgggattgggtaccaacatctacaatgctgaaagattgggtctgggtggagcaggagacatgccaggttcagaaattgccgactttgttgagaatgccgatggatttgccgaggtcttcccacaacacaaatacaacgttgttgagattttacaacagagaggttacttggtcgccatgaccggtgatggtgtcaacgatgccccttccttgaagaaggccgatactggtatcgccgttgaaggtgcttccgatgctgccagatccgctgctgacatcgtctttctggctcctggattgtctgctataattgatgcacttaagacttccagacaaatcttccacagaatgtactcatacgttgtctaccgtattgctctttctttgcacttggaattgtttttaggtctttggattgccatcatgaacagatcattgaacattgaccttgtggtgtttatcgccatttttgcagatgtcgccactttggctattgcttacgacaacgctccatactctccaaagccaactaaatggaacttgcctcgtttgtggggtatgtccatcattctcggaatcattttggcaattggtacttggatcactttaaccaccatgcttttgccaagaggaggtattattcagaactttggttctgttgacggagtactgttccttgaaatctctttaactgagaattggttgatctttattaccagagccgcaggtccattctggtcatcttgtccatcttgggaactggccggtgccgtcattattgtcgacatcatcgctactatgtttactctgtttggatggtggtctcaaaactggactgacattgtcaccgtcgtcagagtttggattttctctttcggagttttctgtgtcatgggtggtgcttactacctgatgtctgaatctgagggattcgacagattaatgaacggtaagcctagaaaggagccacctcctcaacgttccatggaagacttcatcgttgctatgcaaagagtctctacccaacatgaaaaatctgggtga

SEQ ID NO: 3306 - DNA, 6210 bp, Artificial Sequence
  Optimized genes for Pichia pastoris
atgtccgctacctctggagttgttaacagacctttggttttgaaccacggatccattgagtctaccattttgatcccaactaccgaataccatttctatcaaaccttgctggaaggttttagaaagtctttgcctcaagtcaccgagggatttgctgacgatgatgagccatcttcgaaagcagaactcttgatgaaatttttaggctatatcgtccaaagtggtgtctccaaccaacaagaacaattggccgctgctaagttagtcttgaatgagtttgaatctagattcttgcagggtttgaacctgcactcctacgcagcaattttattgaaaagtgagactttccctaccactttgttgaagatcaaagagaatctgatcaagaactactacctgggtagagctttagtttatttgcctggtcaacgtggtctggtgtatcctccttctgcccttcttaatgccggtaagtctggctctgctcaaatttacgccattttcggaggacaaggtaacactgatgactattttgaggagctgagagacatctaccacatctaccagggacttgtttctgacttcgtcactaaggcacaactgaaacttcaagagttgattagaactacaccagagaccgatagaatttacactcaaggtttagacttaattaactggcttgaaaacaaagacaaaactccagaccagcaacagttattaagtattccaatgtcttgtccattaatctgtgttatccagttgtgtcactacattgtcacttgcagaatcttgggaattactcctggacagctaagagactcattgaagggtaccacaggacactcccaaggcttggtaactgctgttgttgtctcaagtgcagattcatgggagtccttcgagaaactggccttacaagccgttgaattcatgttctacatcggtgttagaggtctacaaacttatccaaacacttcactgccaccaagcatcgttcaagattctgaagagaacgccgagggtacaccttcccccatgctgtctgttagagatctgtcatacgatcaattggtcaagttcgtaaatgaaactaatcaacacttgccagaagctaagcatatagacatcagtttgatcaatggaccaagaaacgtcgttttgaccggacctccacagtctttatacggattgaacttaaatcttagaaaggccaaggctccatctggtcttgaccaagctagaattcccttctccgagcgtaaattgagattttctaatagattccttccaatcatgtcaccgttccactctcatctgctttctccttcgactgagaaaatagttgctgatcttaagaaggctggtgttgagttcagtcaatcatcaatgaagttgcccgtttttgatacctacgacggtaaagatttaagatcctattcaggatcaatcgccgccagattggtcgaatgtatcaccaagcttcgtgtcaactgggaattatctactgagttcaactcaactcacgttttggacttcggtccaggtggtgcaagtggattgggtgtcctgacccacagaaataaggaaggtactggatctcgtgttattgtagcaggagtgttggatgccgaatcggaagattctgaatttggttacaaacaggagattttcgaaagtaacgaaaaagctatcaagtatgccccaaattggttaaaagagtataagccaaagctagtcaagacctcagctggtaagatctttgtcgacaccaagttctctaggttgctcggaagagcaccactgatggttccaggcatgactccaaccaccgtttcaccagatttcgtggctgctactctgaatgctggattccacactgaaatcgctggtggtggttatttcgccccttctatcatgaaggccgctctgcaaagagtcatcgatcaggtgaccccaggaactggagtcggtattaacttgatttatgtcaatccaagaatgttgcaatggggtattccaatgattaaagaactgagagaacaaggatttccaatccaatctctttccattggtgctggtgtgccatctctagaggttgctactgagtatattgagactttaggactggctcacttgggtttgaaacctggttctattgatgctgtcaaccaagtgattacgattgccaaagcccacccaaacttcccaattgtcttgcaatggactggtggacgtggtggaggccatcattcttttgaggactttcaccaaccaattctgcagatgtattctaaaattcgtaagtgtaagaacatcattctaattgctggtagtggctttggatctgctgaagatacttacccatacttaacaggttcttggtctcaccagttttcttacccctctatgccattcgatggcgttttgtttggttccagagtaatgaccgcaaaggaggccaagacttctccagctgccaagcaggccattgctgattgtactggtgtagacaacagccaatgggaaaatacttacaagaaaccaacaggcggtatcatcactgtcagatctgagatgggtgagccaatccacaaaattgcaactagaggtgttatgctttggaaagaactagacgacaccatcttcaccttaccaaaaaacaagatgttggaggccatcgctaagaagaaggattacattattaagaagctgaacgctgactaccaaaagccatggttcgctaagaacgagaagggaacttgtgacctagaagacatgacatacaagcaaatcgcagagagactggttgagttaatgtacgtcagaaaatctcaaagatggattgatgttaccctgaggaatttcactggtaagtttttgcgtcgtattgaggaacgttttgccactaaagtcggaaccatctccttgattcaaaacttctcccagttggaagagcctgaaaaggcaatcgactctgttttcaaggcttaccctgaggcagcttctcagcttatcaacgaggaggactgtgattggtttcttttggaggctcaatccccaactcagaaacctgtccctttcattcctgttttagatgaaaggtttgagtttttcttcaagaaggactctctgtggcaatctgaggatttggaggctgtggttggagaggacgttcagagaacctgtattttgcacggtcctgtagctgcccaattttccaataaagtggacgaaccaataaaagatattttggaaaacattcacaagggtcacatcaagtcccttgtgaaggaagtttacaatggtgacgagtctaagataccagtggtcgagtacttctcttcagttgattccttttcagacacagccattgaaggagtaaagattgaaagaagtagaaacacagagacatttactgtcacatctggaaatgttgacaatcaacaatggttcgacttgcttgcaggcaaggagctctcctggagaagagcttttattaccgctgctcgtttggtccagggtaccaactttgtatcaaaccctgctcattccgtattggctccttcaaaggaccttgtcgtcaagatcgagaatggttctgatgcaaagaaaacagtgctgactgccttccaaagagtcaggggaaagtacgttccagctgtatctttgaagtcgattggtgacctgaagatcaagctggaattgatcgaaaccagaacagcagacaagtctgcagtggcattggagttgttctacaactacaagcctacagatggtttcgcacctatccttgaagtcatggaaggcagaaacacctccatcaaaaatttttactggaagttgtggttcggtagctcagtaccagttgacttggattttgacgctaacaagcctatttccggtggtgaagcctccgtgtcttctcaagctattgctgaatttacccatgctgttggtaattcatgtgaggattttgttcctagagccggaagaccacaattggctcctatggatttcgctattgtgcttggttggaaggccatcatgaaggctatcttccccaagactgttgacggagatattctcaagttggttcatttgagcaacggatacaaaatgttcccaggagccgacccattgaagaagggcgatgttgtctctacagttgcccatatcagatcggttgttaacggtgaaactggtaagaccgtggaggttgtgggtgtcatttcaagagatggaaagccagtcttagaagtgaacagtcaattcttttaccgtggaaaatatcaggatttcggtaactctttcaaaaagactactgaaactcctgtgcaggttgctttcaaatcagccaaggacattgcagtcttaaagtccaaggaatggtttcatcttgagaaggatatcgatttgttaaaccagacattgactttcagatgtgaatcatatgtgaaattcaagagctccactgtgtttgcttccgttaagacaaccggtcaggctcttctggagcttccatccaaggagataattcaagttgctgagatcaactatgagtcaggttcatcttatggaaacccagttctggattatcttaccagacatggttccactattgaacagcctattatgttcgagaacgctattcctcttgctcaaggaacagaattgaccagcaaagctccaggtactaacgaaacatatgctgctgtttccggagactacaacccaattcatgtcaacaaggtatttgcctcttacgctaatttgccaggtacgatcacacatggaatgtactcatccgctgcagttcgtgctttggtggaacagtgggctgcccagaacgtcgccacaagagttagggctttcaaggctgactttgttggtatggtccttcctaacgatgagttggttactcatttagagcacgtcggtatgatcaacggtagaaagattatcaaggttgagaccaaaaaagttgaaacggaagaagtcgttctgattggagaagctgagatcgagcaacctgtttctacttttgtgttcactggccaaggttcacaagagcaaggtatgggaatggacttgtacaactccagtgaagttgccaaatctgtctgggacagagccgatgtccacttcatcaacaattacggtttctcaattcttgatatcgtcaagaataaccctactgaacttactgttcactttggaggtgccaagggtcgttctatccgtaacaactacatcagcatgatgtttgaaaccgtcgctgctgatggtcaactaaagtctgaaaagatttttaaggagattaatgaagacactatctcattcacctttaaatctcccactgggctgttgtctgccacccagttcacacagccagcattaactcttatggagaaggcttcatttgaagatatgaaatccaaaggtctcgtcccatcagaatccatgtttgcaggtcactcattaggtgagtactctgctttgacttccctaggtgatgtgatgcctatagagagtctggtcgatgtagttttctacagaggtatgaccatgcaagttgccgttcctcgtgatgagcagggccgttccaactatggtatgattgccgtcaatccttccagagtttcctccaccttcaatgactccgccctgcgtttcgttgtagaacatattgctcagcagactggatggttgttggaaattgttaattataacgttgaaaatacccaatatgttgcagccggtgatttgagaggtttggacactttgtctaacgttctcaatgtcttcaagattcagaagattgacattgttaaattacaggaaacaatttctctggacgaggtcaaggtccatttgtccgaaattgttgatgaagtatccaagaagtcctcttctaagccccaaccaattgacttggagagaggatttgcttgcattcctctgaaaggtatctctgtgcctttccattcaagctacttgagatctggtgttaagccattccagaccttcttgtgcaagaaaatccctaagagtgctgtcaaaccagccaaccttattggcaaatacattccaaacttgactgctaaaccatttcaattaaccaaggaatactttgaagacgtctacgagctaacaaagtcagagaagattaagcacattttggaccactgggaggaatatgaatcttcctaa

SEQ ID NO: 3307 - DNA, 1755 bp, Artificial Sequence
  Optimized genes for Pichia pastoris
atgtctgataagaagacttcagttgaggccgttatcactgaggttgactcttctccagcctatgaggctggttccattaagtctgagaacaagagaaactttgtccaaaactggttcgacggattcaagccttacgagatggaagaattggacccaaacttgtctgaagttgaaaaggcagcaattgctactgccaatgctcctcttcaaagaaagttgaaaaacagacacttgcaaatgattgccattggaggatctatcggtactggtctgttcgttggttcaggtaaggctctggctgctgcaggtccagctgctttgttaatcgcttggggtttgactggaattatgatctactttactgttcaagccttgggagagttgtctgttaccatgccagtttctggttctttcgctgtctactctaccagatttattgacccttcatggggatgtgctatgggtttcaactacgccatgcaatggttgatcgttcttcctttggaactggttgcagcttcaatcaccttatcttactgggaaggttccaagtcagtcaacgctgatgtttgggttttgattttttacttgctgattgtggtgatcaatcttttcggtgttaagggatacggtgaagctgagtttgtattctctcttatcaaggttattactgtcattgctttcatcttcatgggaatcattttgaactgtggtggtggaccaaagggtgagtatattggtggcagatattggaagaaccctggtgctttcaacaccgagtacaacccattcaaggccgtctgttccgtcttcgtcacttctgccttttcttttgctggaacagagcttgttggattggctgctgctgaagccactaatccaagaaaaagtttgccaaccgctatcaaacaagttttctggagaatcatgttgttctacattatctccttgacccttattggtcttttggttcctttcaatgatcctagattgatcggatcctcttccgttgatgcttccgctagcccttttgttatagctattgtatccaacggtattcacggtttggattcagtgatgaacgttgtcatcatgattgcagtgctttctgtcggtaactctgctgtttatggtagttccagaattttacaatctttggctgcccagggtcaagctccaaagatcttgggttacatcgacagagagggtagacctctggcagccatcggtttaaccttgttgtttggttgtttggcatttgttgccgcttctcctaagcagggagaaatgtttgactggttattagctctttccggtctatcatctattttcacctggggttccatctgtctgtctcacatcagattcagagcttgtcttaaatctctgggtagaggtaccaacgaacttgtgttcactgctcaaggtggtatcattggttcttggattggactgatcatcaactgcttggtcttgattgtttccttctgggttgctgccttcccattgggtgacaagtccagtgccgagggatttttcaaagcttacctgaccgtccctgttgttattattgtttacgttatccacaagattgtcaaaaagaattggtgcttgtacgtcaagctgaacgagatggatgtcgattctggaagaagagactttgatttggagctgttgaagcaagagattgtcgaagagaaggaaactttggccagaaagccattttggtacagaacttacaagttctggtgttag

SEQ ID NO: 3308 - DNA, 1362 bp, Artificial Sequence
  Optimized genes for Pichia pastoris
atgtctttcggtaaccattactacttcccagtttccaccacttccttccctaaatggattgacagaatcatgacttcaaacatcaatggatccttgccacaatctgctaatgttgttgtcatcggttcaggatttgctggtactgctgtttcttactatttgcaaaacgagattgctggagaccaatctattgttatgcttgaggctagagctgctgtcagtggtgctacctccagaaactctggcttgatcaagccagaataccacagaaaccacggtgaatatgttgacaagtttggttccaaagttgccggtcaactggttaacttcgaagttgacaacatgaaggagcttgctcgtattttgaccttggactccgacttgaacgaaaaggctgatttccaagaaagaattcatttggatgcctactctaacccaagatcttctgagaccgctatcaacgacttctacgctttcatggagaacgaggaggtctctgttgatttgaagagaaaggtccaaatcttgttcggtgacttggccaagcagttgtccaacgttccaactactccatttgttatccactacccaaacggttctgtcaattcatacgattttgtcaccgccatgttgactcgtgccattcaaaagggtttggctttgtacactaacactttggttgaagaggttcaacaattagactctggtgtttggaaggtttctacttctagaggagagttgtttgccgacaaagtcgttttcaccaccaatgcttatactcaaggtcttcttccagagttctccaagtctatcattccaattagaggtgtctcctctcaagtcaacgtcagaaatactggtaatgagcactccctttccattggttctgacatttacgttcctcaatctaagaacttgctgtactcatctcttggtgagctggagaagcaaaccaactttatggccaactacaacaccgtcgatgattccactgtttcgtctcagtctttggagtacttgcagaagaatttgggaaaggtgaactccttagccactgctactgccacctcttcttcctccggtattatggcttacaccgatgaccactttccttacgtcggacaattgagtgaattgggtaagctgaacgcttacattctggctggttgtaactgttctggattgtctcgtatgctgttgtgtgctaaggaacttgccaaatccgttgctctgggatctgaactgtctgatagagtcccagctccatacaaggttaccagagagagaatgggtttggtcgacaagttgatgcaatcagttttgaatgaacgtgagatcagagaaactagagccagattgtaa

SEQ ID NO: 3309 - DNA, 1086 bp, Artificial Sequence
  Optimized genes for Pichia pastoris
atgccagaccaactttctttcttgaaaagaaagaccggtgtcattgttggtgatgatgtcagaaacttgttccttcatgctcaaaagaaaggtttcgccattccagctatcaacgtcacctcttcctccactgccgttgctgcattggaggctgctcgtgacaacaactctccaattattttgcaaacttctcaaggtggagctgcttactttgccggtaagggtgttaagaactccaaccaggaggcctctatcggtggtgctgttgccgcagctcactacattcgttctgtcgctccattgtacggtattcctgttatcttgcacactgaccactgtgctaaaaagttgttgccatggtttgaaggattcctggctgctgatgaagcctactacaaggaacacggtgagccattattctcttctcacatgttggacttgtctgaggaatcagatgacgagaacatcgctacttgtgttaaatacttcaagagaatggctaagatgaaccaatggttggaaatggaaattggtatcactggaggtgaagaagatggtgtcaacaatgaaaacgctgacaaagagttgctgtacaccaagccagagactgtttttgctgtccacaaggctttggctcctatttctcctaacttctccattgctgccgctttcggtaatgttcatggtgtttacaaacctggaaacgttgttttgagaccatctttgttgggagatcatcagaagtacgccaaggagcaactgaagtctgaatctgacaagcctttgtttttggttttccacggaggatctggttctactcaagaggagtttgacactggtatcagaaatggagttgtcaaggttaatttggatactgattgtcaatacgcttatttgattggaattagagactacgttttgaagaagaaggattacatcatgtcccaagtcggtaacccagaaggtgacgataaaccaaacaagaagtattttgatccaagagtctgggttagagagggagagaagactatgtctgctagagttactgaagctttgaacattttccatactgctaatcaattgtaa

SEQ ID NO: 3310 - DNA, 1374 bp, Artificial Sequence
  Optimized genes for Pichia pastoris
atggttcagcctcaagagccagagtttgaacaagcttacaacgaacttctttccactattcaagattctaccttgtttgagaagaagccagagtacaagaaagtcattgatgtggtctctatcccagaaagagtcgttcaattcagagttgtctgggagaacgacaagggtgagttggaagtcaacagaggttacagagtgcagttcaattctgccttgggtccttacaagggtggattgagatttcatccaactgttaacttgtctattttgaagttcttgggatacgagcaaattttcaagaatgctttgactggactgaacattggtggaggaaaaggtggtgcagatttcaacccaaagggaagatccgacaacgagattagaagattctgttacgccttcatgtctgaattgtccagacacatcggacaatttactgatgttccagctggtgatattggagtcggtggtagagaggttggttttttgttcggtgcttacaaaaagatcaagaactcttgggaaggtgttttgaccggtaagggtttaacctggggtggctccttgatcagacctgaggctactggttatggtttggtctactacgtcgaaaagatgattgagcacgctacccagggtaaggagtctttcaagggaaagaaggttgctatctccggttctggtaacgttgctcaatatgctgctcttaaagttatcgagctgggaggtattgttgtttctctgtctgattccaagggatccattattgctccaaacggtatcaccactcaacagatttccgctattgctgaagctaagttgaaattcaaatctcttgaagaaattactggctcttactctgctttctctgactctccagttaaatacattccaggtgccagaccatgggttcacgttggagacattgacgtcgcattgccatccgccacccaaaatgaaatctctggtgaagaggccaaggctctggttgccgctggatgtaagtacgttgctgagggttccaacatgggatctactttggaggcaatcgatgtcttcgagggagagagagcttcttcttccggaactgctgtttggtacgctcctggtaaagctgccaactgtggtggtgtcgccgtttccggtctggaaatgggtcaaaactcccaaagagtccaatggactgaggaggaagttgaccaaaagctgaaggacatcatgatcaactgtttcgacaattgtttgaacactgccattgcctactcctctgagaccaacaaggattcacttccatctttggttaagggagctaacatcgccggtttcgtcaaggtcgctgatgctatgtacgcccaaggtgacgttttctaa

SEQ ID NO: 3311 - DNA, 1227 bp, Artificial Sequence
  Optimized genes for Pichia pastoris
atgactgagtccgctttctccatttcccacttgcatgttatcactcctactttcatgcacgttttgaaatacaagtacccagagtactctactccaaagtcttcattcttgttgttcttccaatcattattgtacattgagtcaatggtttccaaaaccgctcaaattttggctggtgctgccgttgtcggtactggtttgattctttatcaacaaaagaagcaagaaaagttgcagaccccaatttcttccggtagatctggtaacaacccagtcactgttggttctggtattgctccagctgttgacaaccacactagatggtctcagtctccagaatcaaaattcatttcaaccaagtccttgggtggtcctccagcaaagcaggacgcttacaacgatgctcgttaccagtttgaacaggcccaacagaagtttgaggacaccaaggcttcctggtggcaatggggtcagcaaaaatccgatgaggtctctcgtgagtctgagaaacaatatgagattgccaaggcaaaactggaagacgccactcaatctttgagagaacaaggtcaagatgctttggacactgctgactctcaataccaaacttggaagtcgcaatggcaatccaagttgaatgatgccaaagagaagaccgacgatttggtctcccaagctaaggagcaaaccaaatctttcagttccgaggctagatcaaagcttgataagttcagacaagagtttaactccaagaaggaggagttgcgtaagaaatatgctcatttgtctgaagaagagctggatggtaaggccttcgagtctctgagaggatggggtgaatctgccgaggcctttgccagagaggaatacttggaatccaagagaaacgctgctgagaccagatccactttgcaaagaggttacgacttgtcccagcagaaattgaaggaagcccaggatgaattcaacagaactaaaaaagcttggttctcttggggaaaggatcaaaacgaagaggctcacaacttggcctccagaaagctggctgaagctcagaagtcatttgatgatgcttctaagcaattggaccaattcacttcttctgttgccaagtctgctaaggacaattctgactttgttgttcaaaagactaaggaaggtttggatgttgctaacgacaaggctcaagacggtctgtcatccgtttctaactggatcagaaaataa

SEQ ID NO: 3312 - DNA, 1131 bp, Artificial Sequence
  Optimized genes for Pichia pastoris
atgtatattccaccaacatctttcaacagaaagcaattcaagtactccggtgacaactacaacactccttctgaattcaaagagcaagcccgtttggatattcatagaaaacttgctcaagctcagtccaacttgagacacggttcttctcctttggccacaaagtccatcactgcctcttcctctcaattttctggttccgatgttgaatctttagcttctgttgcttcagatggttcagaaatgaccattgatgagtccaagcgtaagagaaaggcttacctgggattcttgaagaagccagagtctaagttgtccagaactaccaccagaagatcctctttgttctctaacaacctgacccaacaaccaactaaccaaactgaggctacttctctgttcaccaactatttcagtgacaacggtttcgtcactgaagttgacttgaacgaggttcttccaaagaactttgacgacatgtacgacccagatttgaccgtcgagagattctacaatggaagaccagttttcactaagagaaatttggtcaactgggaattgaacgatcttcgttctcttttgattgtctctgagctgaagcctgaatggggtggttacatcccaagaatcagagataaccctgatttccacatcgttttgttgccattgacttcctccgacaatgaatttattgagattttgatgagatctgacatctacaaggaatcaaagttctccaaggagttcaagatgaagactgctgcctacattgttcaatctgctcgttacagacataacttggctattcaagctagatactctgatatgccaaccaaggaccctactttgcaatacttttccaaggttgaatggagaaacattattgaaaattacttgttgaatttgggtgttgagactcaatgtagattggacttccaacacagatgttctatcttgaaaggtcacccagctcaaaagaatgatctgttgtctaaagctatcctgaacaatactcagaagcagttcaatggtaacggattgtccaaagaagagaaggccagaatttggtctcaggcccaatccgaaatttacaaaagactgggtttggactggactccagacaagatctaa

SEQ ID NO: 3313 - DNA, 573 bp, Artificial Sequence
  Optimized genes for Pichia pastoris
atgtgggttttgaactggttccaagatgttcttgcttctttgggattgtggaacaaacatgctaagttgttgttcttgggtttggacaacgctggtaagactaccctgttgcacatgttgaagaacgacagattggctactttgcaaccaacctggcatccaacttccgaggagctgtctattggtaatgtcagattcactactttcgacttgggtggtcacgagcaagctagaagagtctggaaggactacttcccagaagttgatggtattgtttacctggttgacattgctgatccagagagatttgaagagtccagagttgagttggatgctttgctgaagatcgaggaattgtccaaggttccagtcttggtccttggtaacaagattgacaagtctactgctgtttctgagaatgaactgagacacgctcttggcttgatgaccaccactggtaaagacaaagttcaattggttgaaggtcaaagaccattggaggttttcacctgttccatttacttgagacaaggttacggtgagggtatcagatggttgtctcaatacatctaa

SEQ ID NO: 3314 - DNA, 654 bp, Artificial Sequence
  Optimized genes for Pichia pastoris
atgtccaagatttctaccactcaagtcagagagcacgtcaaggagttgttgactttctctaacgagaccaagaaaagaaacttcttggagactgttgaattgcaagtaggtttgaagaactacgacccacaaagagacaagagattctccggttccttgagattgccacaggttccaagaccaaacatgaacttgtgtattttcggtgatgctttcgacgtcgacagagccaagtctttgggtattgacgctatgtctgttgacgatttgaaaaagttgaacaaaaacaagaagctgatcaagaaattggctaagaagtacaactctttcattgcttctgacgttttgatcaagcaagttcctcgtttgctgggtcctcaactgtctaaggctggtaagttcccaactccagtttctcacaacgatgacttgtactctaaagttactgatgttaagtccactatcaaattccaattgaagaaggttctgtgtttggccgttgctgttggtaacgttgagatggaagaagatgtcttggttaaccaaatcatgatggctgtcaactttttggtctctcttctgaagaagaactggcaaaacgtcggttctctggtcattaaatcttccatgggtccatcttacagactgtactaa

SEQ ID NO: 3315 - DNA, 1281 bp, Artificial Sequence
  Optimized genes for Pichia pastoris
atgttggcctctggtaagagattcttctcttcttcctctttgagacaagtctctgcttgggccaaggttgagaaggctccagctgacaagattttgggacttactgttctttacaaccaggacactaatccttctaagatcaacttgggtgtcggtgcttacagagacgagaatggaaagccatggattcttccttccgttagaaaagctgaggaggttttaatcaagactgaggtcaacaaggagtacgttcctatcaccggatctccaaagttcaatgaattgatcaagcaaaccttgtacggaaacgatccagccggtaaacagttgttagaacagaacagaatcgtttcttcacaatccatttccggtactggagctttgaaagttctttctgagttcattaaatacttccacgagggtcctaaggatgttttggtcccaaaccctacttgggctaaccacattgccatcttggagcgttctggattgaccacttccaagtaccgttactacgacttcaacactaaccaattggataagaagggtcttcttgaagatttggagaacgctgctgaaggtcaaccagtcttattgcacgcttgttgtcacaatccaaccggtgttgacccaactttggaagagtttgacgaaattattgacgtcttgtccagaaagaaattgcttccagttgttgatatggcttatcaaggtttcagaagtggtaacccaattgatgacttgtctctgttgttccgtttcaacaaagccgttgtcgatggaagactggacaactttgttttgtctcaatcttttgccaaaaacatgggtctgtacggtgagagagttggttctctttccctgatcacttcagatgctgatgaatctgtcagagtcaagtcccaactggaaaaggttatcagaccaatctactcttccccaccatctcatggttccaaactggtcgagattgttctgtccgatgaggctatttaccaacaatggttgaaggacgttaaggtcatgtctgacagattggtttccatgagaaagcttttgtatgacaccctgaagaacaagtataacaacccattggactggtctcacttgttgcaacagaaaggtatgttctgttacactggtttgaaccctgaacaagttgctaagttgattgaaagatctgtttatttgacttctgatggtagaatttctattgctggtatttatgagcaaaacgtcgactacttggctaatgccattcatgaagttaccaccaactaa

SEQ ID NO: 3316 - DNA, 732 bp, Artificial Sequence
  Optimized genes for Pichia pastoris
atgtctttgccatctgctactgccaacgctgctgttaccaaccaattgttggaacttccagacactaacttggttgctccagccgttactgaagtttctgaaaaggctgctcaatggccagctaacgtcagattgcaaagacagaagaagatcttgtaccaacgtttgaaggttccaccagcaattgcccaattcactaacactttggacagaaacaccgctgctcaaactttcaagttgttcaacaaatacagaccagagacttacgaacaaaagcaagagagattgaccagagaggctgccgccattgctgatggtaagaagaaggaagacgtttcctccaagccatacgttgtgaagttcggtttgaaccacgttgtcgctctgattgaaaacaagaaaccaaagctggttttgatcgctcatgatgttgacccaattgagttggttgttttcttgcctgctctttgcagaaagatgggtgttccttacgctattgttaagggtaaagctagattgggtaccttgattcacagatctaccgccactgttgccgctttggttgatgtcaagcctgaagatgaagctgaattggctcagttggtctctgccatcaacaagaactttactgagaagtacgaggaatccagaaaaaaatggggtggtggtatcctttccgctgagtctcaagctaaagcagcagctaaggccaagattttggaggagaaataa

SEQ ID NO: 3317 - DNA, 1044 bp, Artificial Sequence
  Optimized genes for Pichia pastoris
atgtctgaagaagaacagcaacagaccaatgaaaaggtcattgacttggagaaaagaatgtttgtcggtaacattgattacgacactactgaggaggagttgagagagttgatcactggtttcgatattgaaggtattgagattccaaagagattctctagaagagttggtaaattgaccggtagaggattcgcttttgttacttttgcttcttccgaggagaccgccaaagctatcaccgagtttgagggaaaaaacctgaagggaagagatatctactgtaagtccgccaagttgaagtctactgaagagaagactaagaagaagaaggctaacaagaagaagacctctgctgctaagaacaacgatggtacaacagaaggtgttaccaacactgctgttgacggtactgaggaatctcaagctgacgtttcctccaacgctgattctgcctctgactccgttgctgactcaaaggacaaggagaactccgctccaaacggtggtaagaagaaaaaaccatactccaagaaaaagcaaaacccacacaaggttccattggaacaaggtaccccatccgaaacttccattttcattagaaacttgcaccaagaagttgtcacttctgaacttacagagttcttgtctgagtacgatcctcaatgggtttcaattccacgtcgtaacatcccaagacacgttgttcaaaagctgagaaaggaaaatattcctatcagatccagaggtatggctttcgtcagatttgccgaccacgagactcaacaaagagctttgaaagaattgaacggaaaggagatcaagggtaagccaatttctatcgacattgctattgactctttcgttaaggaagagccaaaagagtcttctgtcaaggatggagctgatgtttctattgtcaccgatggtgctcaaccacaagatgagggtgaggaaggaaaagttgaagaagaggttaaatctgagcctttgaagcctctggaatccaccactattgccccagaggtccaaactaccaccgtctaa

SEQ ID NO: 3318 - DNA, 1680 bp, Artificial Sequence
  Optimized genes for Pichia pastoris
atgcaattgagacattctgttggattggctattttgtctgccattgcagttcaaggactgttgattccaaacattgaatccttgccatcccaattcggtgccaatggtgattctgagcaaggcgttttggcccaccacggtaagcaccctaaggtcgacatggcccatcatggaaagcatccaaagattgctaaggactccaagggtcacccaaagttgtgtccagaggctttgaagaagatgaaggagggtcatccatctgctcctgttatcaccactcattcagcttccaagaacttgattccttactcttacattattgttttcaaaaaaggtgttacttctgaggacattgatttccatagagacctgatttctaccttgcacgaggagtccgtttctaagcttagagagtctgatcctaaccactctttcttcgtttcaaacgagaacggagaaactggttacactggagacttctctgtcggtgacttgctcaagggatacaccggatatttcactgacgacactttggagcttatttccaaacatcctgctgttgctttcattgagagagattccagagtctttgctactgattttgagactcagaacggagctccatggggtctggctagagtttcccacagaaagccattgagtttgggttccttcaacaagtacctgtacgatggtgctggtggtgagggagttacctcatacgttattgacactggtattcatgtcacccacaaggagtttcaaggtagagcctcttggggaaagactatcccagcaggagatgttgacgatgatggaaacggccatggtactcactgtgctggtaccattgccagtgagtcatatggtgttgccaagaaggccaacgtcgtcgctatcaaggttctgagatctaacggttctggttcaatgtccgacgttcttaaaggtgttgagtacgctacccaatctcacttggacgctgtcaaaaagggtaacaagaagttcaagggatccactgctaacatgtctttgggaggaggcaagtctcctgcattggatttggccgtcaacgctgctgttaagaatggtatccacttcgccgtggctgctggaaatgaaaaccaagatgcttgtaacacttccccagctgccgctgagaatgccatcactgttggtgcttcaactttatcagacgccagagcttacttctccaactacggtaagtgtgttgatatttttgccccaggtttgaacatcttgtccacctacacaggatctgacgatgccaccgccactctttccggtacatccatggcttctccacacatcgccggtttattgacttactttttgtcattgcaaccagctgcaggtagtttgtactccaatggtggttctgaaggtgtcactccagcccaactgaagaagaaccttttgaaatacgcctcagttggtgtcttagaggatgtcccagaagatactcctaatttgttggtttacaacggtggaggtcaaaacctgtcttcattctggggtaaagagaccgaagacaacgttgcttcttccgatgacaccggtgaattccactcatttgttaacaaattggaatctgccgttgaaaatcttgctcaagagttcgctcactccgtcaaggaattggcatccgagttgatctaa

SEQ ID NO: 3319 - DNA, 825 bp, Artificial Sequence
  Optimized genes for Pichia pastoris
atgtcttctgagtctagaacttactctttcaagattttttccattttgacctatgctctgtctatctacggtgaagttagatactttttattcagaacccaccactccagatcttacttgactccattcaccggtaactctaccttggactacatttatgtcattgccactcttcttttgcagttgctgtttgttgtccaatacttctctcaagatggtactgtctctgctagagagcagaagaacgtgttggagcaagttggttaccacttcagtatttacaacgtcttgaacttcatttgggtttacctgttcaaacataagagattcttgtttgctgagattgtccttttcgtcaacctgttcaaccttctgtcattgtatttcatccacaagacctacgctatcaaggacttgggtagatggttcactattcatttgtctactgttgctcttccattgtcttggattcaatatgccattttctggaacggtgctgctttgttccactctcactacgtttctttgttgccaagattgttggccaacttgttgatctgggaatttttgttggttccagctttctttattgttgttttcgctgattatggtgtcggtttctcctcctcttatttgactttgtcaattgctgttggtcaattgttaaccaaggttattggtttgcaatggatctttggttttgtcatcgctggaactatcttcctgttgtccttgttggtctccactggtgttttggctggtaaggtcgctaacaacaataacgttcttggttctgacagagaacaagctccattattgacatga

SEQ ID NO: 3320 - DNA, 249 bp, Artificial Sequence
  Optimized genes for Pichia pastoris
atggttttggtccaagatttgttgaaccctaacccagtttctgaggctaagcaacacaagttgaagactttggttcaagctccaagatctttcttcatggatgtcaagtgtccaggttgtttcgagatcaccactgttttctctcatgctcaaactgctgttacttgtgattcttgtactactgtcttgtgtaccccaactggtggtaaggctagattgtctgaaggatgtgctttcagaagaaaataa

SEQ ID NO: 3321 - DNA, 363 bp, Artificial Sequence
  Optimized genes for Pichia pastoris
atggctggtttgaacgctaaggaattgagagccaagtctgagcaagagttggaggctgagttgattgaacagaagaagaagttggctcaattgaaggttcaaaaattgaccaaggcttctgttccagagatcaaggccgtcagaaaggacattgctagagtccttactgttatcaacttgcaaaagagagatgctgttagagaatcttacgccggtaaggagcacattccaaagcaactgagagagaaaaagaccagagctcttagacgtgctttgactgctgaagagaagtcccatgaaactgtccgtcaaagaaacagaagagttgctttcccaagaagattgtacgctgtcaaggcttaa

SEQ ID NO: 3322 - DNA, 1059 bp, Artificial Sequence
  Optimized genes for Pichia pastoris
atggatattgatcttgatatccaaatgaaggatgctgttgaaccagacttggaggaccaacaatcttcttcctcatctgaatcttttgacttccctatcaacaacgtcaattactcatccaagccagttgagttgacttcctccaacattaaccagttggactcatggattgagcaactgactgactgtaagcctttgtctgaggagtctgtcaagaagttgtgttccatggctatcgacgttttgaagtttgaagagaatgtccaaccagtcaacgttcctgtcactatctgtggtgatgttcatggtcagttccacgacttgatggaattgttcaagatcggaggtccatgtccagataccaactatcttttcatgggtgactatgttgaccgtggttactactccgtcgaaactgtttcttacttggttgctatgaaaatcagatacccaaagagaattactattttgagaggaaaccatgagtccagacaaatcactcaagtttacggtttctacgacgaatgtttcagaaagtacggatccgctactgtctggaagctgttcactgatctattcgactacttcccaattaccgctttggtcgacaacaagattttctgtttgcacggtggtttgtctccaatgattgaaaccattgaccaggtcagagaactgaagcgtgttcaagaagttccacacgaaggtcctatgtgtgatttgttgtggtccgaccctgacgacagaggtggatggggtatctccccaagaggtgctggttttactttcggtcaagacatttccgaacaattcaaccacactaacgatttggatttgattgctagagctcatcaattggtgatggagggatactcttggtctcaccaagatctggttgttaccatcttctctgctccaaactactgttacagatgtggtaaccaagctgccatcatggaggttgatgagagacacaacagagagttcttgcaatacgatccatctattagaccaggtgagccaaccgttactcgtaagactcctgattactttttgtaa

SEQ ID NO: 3323 - DNA, 255 bp, Artificial Sequence
  Optimized genes for Pichia pastoris
atgttccaaagaactactgctactttggtcagacagaacaaggccattgctagattttactctgaaggttccactggtgctccaagatctgatggttctggtgatgctttcaccaagagagaaaaggctcaagaggatttctacatcaagaagcaccaagctgaacagttggccaagttgagagagcaattgaagaaccaaaaggagcacttgcaaaacttggagaaggaaatcaacaacatcaaagagaaataa

SEQ ID NO: 3324 - DNA, 1062 bp, Artificial Sequence
  Optimized genes for Pichia pastoris
atgtctacttttgatttcttgtccagaaagtctggagttattgttggtgacgatgttagaaaattgtttgagtacgctagagagagaaagtttgccattccatccattaacgtcacttcatcttccactgccgttgctgtccttgaggctgccagagacaacaaatctcctggtaagggtgtgaacaataaagatttgtctgcttctgttactggttctatcgccgctgcattgttgatcagaactattgccccatcttacggtatcccagtcattttgcacaccgaccactgtcagaagaaatggcttccatggtttgacggtatgcttgatgctgatgaagagtattttaagactcatggtgagccactgttctcttctcacatgttggatctgtctgaggagactgatgatgagaacattgctatttgtgttaagtatttcaagagaatgaccaagatgaaccaatggttggagatggaaattggtattaccggtggtgaagaagatggtgttaacaacgaaaacgctgacaaggactctttgtacacttccccagaaactgtttttgctgttcacaaggctttggctccaatttctccaaactttgcaattgcagcagctttcggtaatgtccacggtgtttacaagccaggtaacgttgagttgagaccttccatcttgggagagcaccaagcttatgctgctcaacagttgggtctgaagaatggatccaaaccattgttccttgtcttccacggtggatctggttcctctcaacaagagttcaacactgctatcaaccacggtgtcgtcaaggtcaacttggacactgactgtcaatacgcctacaccatcggttctcgtgactacattttgaagaacaaggattacttgcaatccatggttggaaaccctcaaggtgccgataagcctaacaagaagtacttcgacccaagagtttggattcgtgagtctgaaaagaccatgtccggtagagtcaaggaagctttggaagttttccatgctgctggtactttcaagtccgagtccaagttgtaa

SEQ ID NO: 3325 - DNA, 777 bp, Artificial Sequence
  Optimized genes for Pichia pastoris
atgtctacccaccaagatattgagtcttccgctgaaactgctcacaaccctcatgatgagatccacaagggtgagtttgttaccactcaacaagactacttggctccatttactggtggtttgatctccggttaccaagtcagaccatccagaaagttcgccaacccagttcctgctggtgtcttctctttgggtacttccttgttcactcttggtttgattttggccggtaccagaaacgtttcttctccagctgttcttaccggttctttcctgttctcctctggtctgattcaaatcatctgtggtatctggtctattgtcttggagaatgtttttggttccgttctgctgttgtgttacggtggattctttgcttccttcggtgctatccaaaacggtatgggtgttgacgcttacactgatgctgatgaattgaccaacgctttgggattgtacgttgctgcttggaccgtctttgccattgttttgtggactgccactttcaagtctactttgccattgtttttgctgaccttcttcaccgctatgtttttccttctgtacgacattgctattttcggtaaccacactggatgtgagactgcttctggagttttctgtttcttggctgccatgtgtgctttctatgctggatatgttggtatgaccaagaaccaaagaaattcttacattcctgttccaaagactaaatggttgttgatgccatcttctgctagatctcctgattacaaccaggctggtttctacgtctaa

SEQ ID NO: 3326 - DNA, 534 bp, Artificial Sequence
  Optimized genes for Pichia pastoris
atgggtagaagaaagtctcaagctgctgctgagagaaatttggaaccaatcaagatctctactgactctatcaagaagagaccaagaagagactccaatgagccaccattcaagaaatttgatgatttggagatgtttgaaacttacctgaagggtgaatcttgggacaacgactttgacttcttgcacgctagattggattactaccctcctttcatcagaaacgagattcatgatgacccagaaaagattaagccaaccatgaacaacaagtccaagaagtttgttagaaacttgcatcaccacgttgacaagcacttgttgaagcaaatcaacgatatggttggtattgagtacaagttcaaaagagaggaagagaagttgccagatggaagactgatctggagatacaaagatgagtctgaccacggtttcgaaggtttggacagaaaatggactgttgaggttgatgttgaatgttctccaaatgatccaactgtcgttgtcgacatgagatccattccaattgattag

SEQ ID NO: 3327 - DNA, 837 bp, Artificial Sequence
  Optimized genes for Pichia pastoris
atgaccgacagagctactcaaaactccatcaacaccaaccagaattccaactcatcatttaaccaagatgtcgagaagggtgatgttgaggctcaaggtgctccagctcagcctacttttaccaattctactttcagacacgatgaccagaacatttacattaacgataccgctattccaaaggaggagttcatgtatgctttcggtggaactttgaccactggtagacaatctgttcacagatcttttggtaaccctgttcctgctggattggctggtttctctttgggtacctttgctttgggattgatcttgttgcaagctagaggtgttactgacgtttccattttgattggtatgttcttgtttgtctctggtgtcgttgaaattattgctggtatctggtgtattgttgtggagaacacttgggcctctgtcgtctttttgggttacggttctttctggttgggctacgctgccattgtcactccagcctttggagttgctgcagcttacgagactgctgaagatttcaacaacgctgttggtatgtacttgtgtccatgggctgtcttctccttcattttgtggtcttgtacctggaagtctacatggccattgactgccttggttttctgtatcttcatgattttcctggttttgaccattggatactttgtttcttccgttccaaccatcaaggctggtggtgttttttgtttcgtcggttccttgctgggattctacaacatgtacgccggtttggccaacccaactaactcttacgttgttgtccacccattatttatgccaaatgctgctaagccagcaagttga

SEQ ID NO: 3328 - DNA, 1197 bp, Artificial Sequence
  Optimized genes for Pichia pastoris
atgtctgttagaaatgccactttcagattgtccagagctgctattgctaagagaaccttggtcagaatcgcctctcaagcttcccttagaccaactaccctgaactctgctaccggtgttgctagaagccaattgaccttttctcgtggtgtcaagactatcaactttggaggtgttgaagaggttgttcatgaaagatcagactggccaagagagaagttgttggaatatttcaagaacgacactttggcattgattggttacggttcccaaggatatggtcaaggtctgaatctgagagacaacggtttgaacgtcattatcggtgtgagaaagaatggagcttcttggaaagctgccattgaggatggatgggttccaggtgaaaacctgtttgatgtcactgaggccatcaagaagggttctatcatcatgaacttgctgtctgacgccgctcaatctgaaacttggtctactgttaagcctctgttgactgaaggtaagaccttatacttctctcacggtttctctccagtcttctccaaccttacccacgttgagccaccatctaacattgacgttattttggctgctccaaagggatccggtagaactgtccgttccttgttcaaagagggtcgtggtatcaattcttcttacgctgtctggaacgatgttactggaaaggctgaggaaaaggccattgcccttgctgtggctgttggatctggatacgtttaccaaactacttttgagcgtgaggtcaactccgacttgtatggtgagagaggttgtttgatgggtggtattcatggtatgttcttggcccaatacgaagttttgagagagaatggtcacactccatccgaagctttcaatgaaaccgtcgaggaggctactcaatccctgtaccctttggttggtaagtacggaatggactacatgtacgatgcttgttctaccactgccagaagaggtgctttggattggtacccaattttcaaggatgccttgaagccagtttttgaagatttgtacaactcagtcaaaactggtaaggagacccaaagatctttggacttcaacagtcaaccagattacagagaaaaattggagaaggaattggagattattagaaacatggaaatttggaaggtcggtaaagaagtcagaaaacttcgtccagagaacaactaa

SEQ ID NO: 3329 - DNA, 681 bp, Artificial Sequence
  Optimized genes for Pichia pastoris
atgtctattccaaagccagaaggttctactttgcgtttgggatccaccgctcctgatttcaaggctgagacttctcgtggtccaatttctttccacgattttatcggtgattcttgggttgttctgttctctcatccagatgacttcactccagtttgtactactgagttgggtgctttcgccaagttgcaacctgagtttgagaagagaggtgttaaattgattggtttgtctgccaacaccaccgattctcaccaagcttggatcaaggacatcgatgaggttactggttcccacttgactttcccaatcatcgctgatccagagagaaagattgctttggcttacgacatgattgactttcaagatgcttccaacgttgacgacaagggtgtccaatttaccatcagatctgttttcattattgatcctaagaagaaggttagactgattttgtcttacccagcttctaccggtagaaacactgctgaagttttgcgtgttatcgactctcttcaaactggagacagaaacagagttaccactcctatcaactgggttccaggtgacgatgttattgttcacccatctgtcaccaacgaagaggctaagtctttgttccctcaattcagagtcatcaaaccatacttgagattgaccccattggacccatccaaataa

SEQ ID NO: 3330 - DNA, 678 bp, Artificial Sequence
  Optimized genes for Pichia pastoris
atgggtgacactttgaaggagccaatcatttttgctccaaagacttaccaatacgacaagtttcaattgaacccagaagacatggctgaggatccaattgaacaatttaccaagtggttccaagaagctcaagaggccagagaagatttgccagaggctgtcaacttggctactgctagacttccatctggaagagtctcttccagagttgttttgttcaaggaattggacgatagaggtttcgtcatttactccaactgggagcaatccaagaagggacaagatgtcaagtctaacaagtacgctgccatcactttcttctggaagggtttgcaaagacaagttcgtgttgaaggtgtttttgaagccgtttctcgttccactgttcaaagatactttgacaccagaccaagaggatcaagattgggtgcttgggcttctcctcaatctgttgagattccttctagagctgctttggaatccaatcttgaggctattgagtctcaattcagagactctgtctccgttccagtcccagaccactggggtggtcaacgtctggttcctttggagatcgagttttggcaaggtagaccttccagactgcatgacagattggtttacagaagagagaacctggaggacaacaaatggtctattgtcagaattgctccttaa

SEQ ID NO: 3331 - DNA, 1410 bp, Artificial Sequence
  Optimized genes for Pichia pastoris
atgtctgccattagatcaattgctcagagaactttgagaactcaagctcagatttccagagtctcctttttgggtgctagagcctactctaccaaagagccaactttaaaggaaagatttgctgaactgttgccagagaagattgagcaaattaagcaattgaaggcagagcacggaaagactgttattggtgaagtcttgttggagcaggcttatggtggtatgagaggtattaaaggtttggtctgggaaggatctgttttggacccaatcgaaggtatcagattcagaggtagaaccattccagatattcaaaaggaattaccaaaagcaccaggtggaaatgaaccactgccagaagctctgttctggttattattgactggagaagtacctactgaatcccaaaccaaggctttcagtgaagaattggctgcccgttctgcacttccaaagcatgttgaagagctgattgacagatctccagctactctgcatccaatggctcaattctccatcgccgttactgctttagagtctgaatctcaatttgccaaagcttacgctaagggtgtcaacaagaaggagtactgggtttacacttacgaggactccattgatttgattgccaagttgccaaacattgcagccagaatctacaagaacgtcttcaaggatggtaaggttggatccgttgatccttccaaggactactcagccaacttggcctctttgttgggatttggtgagaacgctgagtttgttgagttgatgagattgtacctgtctattcattctgaccacgagggaggtaacgtttctgctcacaccacccacctggtcggttctgctctttcttccccattcttgtcttttgctgctggtttgaacggtcttgctggaccattgcacggtcgtgctaaccaagaggttttggaatggttgtttcaaatcaagaaggagcttggtggtgacttttctaaagaaaagatcgagaagtacttgtgggacactcttaaggccggtcgtgtcgttcctggttacggtcacgctgttctgagaaagaccgatccaagatacacagcccaaagagagttcgccctgaagcacttgcctgattttgacttgttcaaattggtttccgctgtctacgaagttgctccagttgttttaacagaacatggtaagacaaagaatccatggccaaatgttgactctcactctggtgttcttttgcaatactacggattgaccgaggagtccttctacaccgttctattcggtgtctctagagctttgggtgtgcttcctcaactgatcatcgaccgtggtgttggtgccccaattgagagacctaagtctttctctactgagaaatacattgaacttgtcaagggactgggtaaataa

SEQ ID NO: 3332 - DNA, 1020 bp, Artificial Sequence
  Optimized genes for Pichia pastoris
atgtctaccagacctcaagtcactgtcatttctgttgaaggtaaaccttcttctacttcccttccattgccagctgtcttcaaggctccaattagaggtgacattgtccaatccgtgttcactagaatcaacaagaataagagacaagcttacgccgtttctgagaaggctggacaccaaacttctgcagaatcttggggtactggaagagctgttgccagaattccaagagttggtggtggaggaactcatagatctggtcaaggtgctttcggtaacatgtgtcgtggtggtagaatgtttgctcctaccaagatctggagaaagtggcatgttagagtcaacttgaacgagaaaagatatgctactgcttctgctatcgctgccacttcagttcaatctctggttttggctagaggtcacagaattgagcaaattgccgagatcccattggttgtttccaacgacttggaggctattcaaaagactaaggatgccattgctgctctgaaagctcttggtgcctctgacgatttgatccgtgttatcaagtccaagaagttgcgtgctggtaagggaaagtacagaaacagaagattcacccaaagaaggggtcctttgattgttttcaacgaagacaagggtttggtcaaggccttgagaaacattcctggtgtcgaaacttgtaacgtcagaactttgggattgttgcaattggccccaggtgctcacttgggtagatttgttatttggactgagtctgcctttgccgctttggactccgtttacggttctgaaaccactgaatccgtcaagtctaactactctttaccaaagaacatcatcaccaacactgatatttcctctgtcatcaattcagctgaggttcaggccgccatcagaccatctttggcaggtaagccaacccatttgcacgttaagaaggttaacccactgaagaaccatgaagttatgttgaagctgaacccttacgctaaggtcctggctgaaaagaaataa

SEQ ID NO: 3333 - DNA, 1743 bp, Artificial Sequence
  Optimized genes for Pichia pastoris
atggccttcggtgacaagttgactcacagattccacaaatcatctgacgcttctaccggagctgcttccgttgaggagtactccacttctatccatgagaaatccgacaagtctgccattggtaagttcttggataagattgctgttcaggaggaaaagggtctttctgtgtctcaaacttttttatttaactttgatctgagaccagtggagtctgctagaagagtttggtcttggttcaactatgtgtttttctggattgctgactctttcaatatcaacacctggcaaattgccgctacaggtgttcaagctggtatgtcatggtggacttgttggctgtctgtctgggttggttacttcttgtgtggaattttcgtcactatctcagccagagtcggaatttactaccacgtctcctttccagtttcttgcagatcttcatttggagttttcggatccatctggccagtcttcaaccgtgttgttatgtcttgtgtttggtacggtgtccaaggatatattggaggtactaccatggctttgatgttgagatccatttttggtaacgatttgaacactagaatcccagacggtatttcttctcctaacgttaccactttcgaattcctttccttctttcttttttggttattctctcttccatttatttggttggaaccacacaaggttagacacttgtttactgtcaaatcttacgttgtcccagctaacggtattggtccaatcgtcaagcaaccatctactattcatggttctgagtttgcttgggagttcattagaatggtcatgaactcattggccaattttgccactttgatcaccaacgctccagatttctccagattttccaagaccaagaagtccgccaaatgggctcagctgttttctattcctctttgtttcagtatcacttcactgatcggtatcttggtctcttccgcttcaactgttatttatggtgagacttactggtcccctattgatgttttgggtagatttttggacaactacaactccggaaacagagccggtgtgttcttcatctccttggcttttgcacttgctcaattgggaactaacatctctgccaactctttgagtgctggtaccgatgctactgctcttttcccaaagtacattaccatcagacgtggtggttatatctgtgctgccgtcggtctggctatctgcccatgggaattgttgtcctcatccaacaagtttaccacctacttgtcagcttactctgtttttttgtctgccatcttcggtgttatctttgctgattattacatcgttaagagaggttggttgattttgaccgacttgtacaatgctgagaagacttccgcatacacttattggcacggtatcaattacagagctttcgttgcctacatttgtggtattttaccaaacattgttggatttgttggtgctaccggtgcaggttcagttcctcaaggtgccatgtacgtctacgacttcaacttcttcactggtttcgcctcttcaattgtcgtttatgttctgctgtgttacatccacccaattccaggtttgccaactgatatcaagaaggacctgttcaagaagggatggtacgagatctacgctgaagttgaagaatttgacgtttccggtggagtcattaatggtgaaggtcaagagccagaggaagaggctattgactactactcagaagagaagaaagtctaa

SEQ ID NO: 3334 - DNA, 2712 bp, Artificial Sequence
  Optimized genes for Pichia pastoris
atggaggaaacccaattcactgacagagccttggccatcatcaccaacgctaccaagctggccaaggataattctcatccacaagttcaaccaattcatttgttggctgcaatggctccaaccgatgaagacactactccatacttgaaggtccttgtggaaaagggaagatttgattggcaaactttcgagagaaacatcaaccgtgccttgatcagagttccatctcaaaccccagctccaactgatgtctccttctctggtgtggcagctcatgttattcaagaggctggaaagatgagacagcaacagaaagatagttacattggtcaggaccacttgcttttagctctgttagaagataagtccattactcaaattctcaaggactcctccatctctccagatgccctgaagactcagattatcaacttgagaggtaaccagagaatcgactctagacaagccgattcatcatctaatcatgaattcctggacaagtacgccattgatttgactgagcaagctcgtgaaggtaaaattgatccagttatcggtcgtgaggaggagatccgtagaaccatcagagtcttggcaagaagaactaagtcaaacccttgtttgattggtgacccaggtgttggtaagacctctattgttgaagctgtcgctcaaagaatcattgacaacgatgttcctaacatattgcaaaactccaaactttacgctttggacttgggtgcattgaaagctggtgccaaatatcagggtgagtttgaagaacgtatcaaaggtgtcctgaatgaaattgctgagtctaaacaaatgattattctgttcattgatgagattcacatgttgatgggtgatggtaagtctgacgctgctaacttattgaagccaatgcttgcccgtggttctttgcactgtattggagccaccactgtgattgagtacagaaagtacgttgagaccgacggtgctttcgaaagaagattccaaagaatcgatgttagagagcctactatcagagaaactgttgctatcttgagaggtttacagccaaagtatgagatccaccacggtgttcgtattttagacagtgctcttgttaccgctgcccaattggcttccagatatcttacttaccgtaagctacctgactctgctgttgaccttatcgacgaatcatccgcctctgttgccgttgccagagactcaaagcctgaagagctggataccaaggagagggaactacagttgctggaagtcgaaatgaaggctttagagagagatgctgattctgataaaaccaccgaggagcgtttgacagcagtcaagcaaaaagttcaggaattggaggaagagttagtcccattgcgtgctaaatacgagcaggagagagcaggtcacgaggagctaactgccgcaaaaaagaagttggatgaacttgaaatcaaggccacagacgccgaaaggcgtcatgacaacgccactgctgctgacttaagatactttgctattccagacgtgaagagaaggatcgctgaattggaagagaaagtcgccgaggaagaagccgctttgtcagacattgccatgatcactaacgttgttggatccgaacaggttgctgagactgctgccagattgactggtattcctgtccaaaagctcacccaggcagagaacaacaagttgattaccatggaaagagagttgtcctcttctgtcgtcggtcaatctgaagctgtcaaggcagtttccaacgcaattaggctgtctcgttctggattggccaacccaaatcagcctgcttctttcttgtttttgggactttcaggatctggcaagactgaactggctaagaaggttgctggtttccttttcaatgatgagaaggctatgattagaattgactgttccgagcttggtgaaaaatggtcttacactaaattgttgggctctgagccaggactgattggcagtgaccaaggtggtctgttgaccaatcaactgctgagacacccttactccgtcattttgttcgacgaggttgagaaggccgccccagaagttttgaacattcttttgcagatgttagatgacggtagaattacagcttcaaatggtactttggtcaactgttctaactgcattgtcatcatgacttccaatttgggtgctcagtttattaactctgccaagggttccaagatctctcctgagacaaaagagttggttatgaccgccgtcagagctcacttcagaccagagttcttgaatagaatttccgctactgtcgttttcaacagattgtctagacatgccatttctaagatcgttaagattcgtcttgctgagattgaacaacgttttgaggccaatgctaagtcaattaagcttgatgtcgatgatgcagcaatcgaatacctgtgtcgtaacggttactcttccgacatgggagctagacctctgaacagacttattcagaacgaaattttgaaccaattagccgttctgatcctgaaaggacaagtcaaagacaaggaaaccgtcaagattagactgggttccaagggtttggacgttcttccaaaccatgctgttgaatctgactccatggatgtggacgtcgacgactgggttgatgctgctgaagaagaggattccgacaataaccacgacgatcaagctcctttgtacgattag

SEQ ID NO: 3335 - DNA, 2343 bp, Artificial Sequence
  Optimized genes for Pichia pastoris
atgttgtctgcaagaagagttttggccaagattaactccagaggattggccactgtctctggtttaaccaaggattccttggtcgagatgaatttgctggagaagggcaattacatcaactacaagcaacaattggacaacgtcaacattgtcaaagaacgtttgggaagaccattaacatacgctgaaaagctgctgtacggtcatctggacaagccacatgaacaagatatcgagcgtggtgtttcctatttgaaattgagacctgacagaattgcatgtcaggatgctacagcccaaatggctattctgcaattcatgtctgctggaatgccatctgtcgccaccccaaccactgttcactgtgatcatttgatccaagctcaaaagggtggtgcagcagatctggaaagagctatccgtctgaacaaggaggtttatgacttccttgccactgcttgtgctaagtacaatattggattctggaagcctggatccggtatcattcatcaaattgtgcttgaaaactatgccttccctggtgaattgcttattggaactgattctcacactcctaacgctggtggactgggtcagttggcaattggtgtcggaggagctgatgcagtcgatgttatggccggtttgccatgggaactgaaagctcctaagatcattggcgtcaagttgaccggtagaatgaacggatggacttccccaaaggatattatcctcaagttagctggtattaccacagttaaaggtggtactggtgctattgttgagtacttcggtgatggcgtcgacactttttcttgtaccggtatggctaccatctgtaacatgggtgccgagattggtgctaccacctccgtcttcccatttaacaattccatggttgatttcttggatgctactggaagatctgaaatcggtgagtttgctaaggttttccagaaggaatatctgagtgccgatccaggttgtgaatacgaccaagttattgaaattgacttgaatactttggagcctcacatcaacggtccatttactccagatttggctacgccagtttctaagatgaaggaggtcgctgttgccaacgactggccattggaagtcaaggtcggtctgatcggttcctgtactaactcttcttacgaggacatgaccagagctgcctccattattgaggatgccgcctctcatggtgttaaggccaaatctttgtacaccgttactccaggatctgagcagatcagagcaactattgctagagacggacaactgaagactttcactgactttggtggatcagttcttgctaatgcctgtggtccttgcattggtcaatgggacagacaagacatcaagaagggagacaagaacaccattgtatcctctttcaacagaaacttcacctctagaaatgatggtaaccctgctactcatgctttcgttgcttctcctgaaatggtcactgcctatgctatagcaggtgacctgagattcaacccactgaccgataagcttaaagacaaagatggtaatgaatttttgttgaaggaccctgttggtgtcggcttaccagtcagaggttacgatcctggtgagaacacttaccaagccccaccagaagatagagccagtgttgaagttgtcatttctccttcttctgacaggttgcaaagattgacaccattccaaccatgggatggaaaggacgctgagagacttccaattttgattaagtctgttggtaaaactactacagaccacatttcaatggcaggaccttggttgaaatacagaggtcacttgcagaacatctccaacaactacatgattggtgccatcaatgctgagaatggagaggccaataacgttaagaaccactacactggtgtttactctggagttccagacaccgctgccgcttaccgtgacaatggtgtgaaatgggttgttatcggaggtgaaaattttggagaaggttcatcaagagagcacgctgctttggagccaagatacttgggtggtttcgccatcatcactaagtcctttgccagaatccacgagaccaacttgaagaaacaaggtcttttgcctttgaactttaccgacccagcagcctacgaccgtattcaacctgatgatgaagttgacattcttggtttgactgagttggctccaggtaagaatgttaccttaagagtccacccagctgacggttctccaacttgggagactcctctttcccacacctacaacgccgagcaaatcgaatggttcaagtatggttctgccttgaacaacatggctgctgtcaaggcttccaaataa

SEQ ID NO: 3336 - DNA, 732 bp, Artificial Sequence
  Optimized genes for Pichia pastoris
atgccagaggttttgatttccaagaagagaaagttggttgctgatggagttttctacgctgagctgaatgaatacttcactcgtgagttggctgaagatggttactctggagttgaagttagagtcactccaactaccactgagatcatcattagagccactcaaaccaactctgtcttgggtgagaatggtagaagaatcagagaattgaccgctctggtccaaaagcgtttcaagattgatgaaggtaaggtcattttgtacgccgaaagagttcaagacagaggtttgtctgctgttacccaatgtgagtctttgagatacaagctgttgaacggtcttgctattcgtcgtgctgcttacggtgtcgtcagatttgtcatggattctggtgctaagggtgttgaggtcgttgtttctggtaaactgagagcagctagagctaagtccatgaagtttgctgacggtttcatgattcactccggtcaaccagccaaggatttcattgaaactgccaccagacacgttctgttaagacaaggtgttcttggtatcaaggttaagatcatgagagatcctgctgctgccagaactggtccaaaggctttgccagactttgttaaaattcatgaacctaaggacgagagagaggttccagctccattcgtcaagtcttacgttgccgagccagttgtcgaggctgaagaagctgaggagcaagctactgcttaa

SEQ ID NO: 3337 - DNA, 486 bp, Artificial Sequence
  Optimized genes for Pichia pastoris
atgccaattgaccaacagaaattggaaaagctgcagaagtctggtccaagaagagtcggtggtgctagattgaagcaaaagagatccaacagagatgccgaagctgacgacaccaagttgcaggctactcttcaaaagttcaacgtccaaactttgactggtgtcgaagaggcaaacttcttcaaggatgatggtaaggttttgcacttcaatagagttggtgttcaagctgctgccaactacaacacttacgccttcaccggttacgctcaagagaagaatatcactgatttgattcctggtattttgcctcaattgggtgcagagaacttgcaattcttgcaacaaattgctgagtctttgcaaaaaaacccagatgctttgaacgctctgaagaaccagaaccaagaaggtgccgaggctgaagatgactctgagattccagagttggttgagggtgaaactttcgacaagaacattgattag

SEQ ID NO: 3338 - DNA, 1542 bp, Artificial Sequence
  Optimized genes for Pichia pastoris
atgactgttgttgagccagttggtgacgttttcaacactattcttgtcttggacttcgagttcaacgtttacgctgagatgttgccatgtactcaaaagatctctgaacttccattcactccaactggtgttatcttctccggtggaccattttctgtttatgaggaaggttctcctcatgttgacaaggagatttttaacttgaatgtcccaattttgggaatctgttacggtatgcaagagttggcttggattgacaacgtcgaaaatgttgctagaggtgagaagcgtgagtatggtcctgctacattgaacgtccaagataaagattgtgctcttttcaaagacgtcgaccactctcaggtttggatgtctcaccacgacaaattgcacaacctgccatctggtttcaagacagttgccactaccgagaattcacaatttgccggtgtcgccaacgaagctaagaagatttacggaattcaattccatccagaggttacccactccgttcaaggtaagaccattctgaagaacttcgctgtcaacgtttgtggtgccacccaaaactggaccatggagaactttatcgacactgagatcaacagaatcagaaccttggttggtccaaccgccgaagtcatcggtgctgtttctggaggagtcgattctactgtcgctgccaagttgatgaaggaagccattggagacagattccacgctatctacgttgacaatggtgttatgagaaaaaatgaaaccatcaccgttaagaaaactcttgatgatggactgggtatcaatttgaccgtcgttgatgctggagaacagttcctttcccagttgaagggtgtcactgatcctgaaaagaagagaaagatcattggtaacaccttcattcatgtctttgagaaagttgcagccgacattaagccaaaggatggttccgaaattgagtttttgttgcaaggaactttgtacccagatgttattgagtctatttctttcaagggaccttctcaaactatcaagactcatcacaatgtgggtggtttgactgaaaacatgaaactgaaattgatcgagcctctgagagaattgttcaaggacgaggtcagacatttgggtcaattgttggatattccagaagatttggtctggagacaccctttcccaggtcctggtattgcaattagagttttgggtgaagttactcctgagcaagttaaaatcgcaagagaggctgattacattttcatcgaagaaatcaagaaggctggtctgtacagaaagatttcccaagcttttgctgctctgttaccagtcaagtctgtcggtgtgatgggtgatcaaagaacttacgagcaggtcattgctttgagagctattgaaacttctgatttcatgaccgctgactggttcgtttttgaagcagctttcttgaaaaaggttgcttccagaattgttaacgaggtggacggtgttgccagagtcacctacgacatcacttccaagcctccagctactgttgaatgggaatag

SEQ ID NO: 3339 - DNA, 1437 bp, Artificial Sequence
  Optimized genes for Pichia pastoris
atgtcttccttccgtgttttggacttggtcaagccattcactccatttttgccagaagtcatctccccagagagaaaggttcctttccagcaaaagttgatgtggaccggtgtcactttattgatcttcttggtgatgtccgagattcctttgtatggtatcacttcttctgattcttcagatccattgttctggttgagaatgatgttggcttccaacagaggaaccctgatggaattgggtatttcccccatcgttactagtggaatggttttccaattgctgcaaggaattcaaattctggatgtcaacatggagaacaaggctgacagagagctttttcaaactgctcagaaagtcttcgccattcttttgtccatcggtcaagccactgtttacgttcttactggtatgtacggaccaccaggtgagttgggagttggtgtttgtttgcttttagtcttgcagttggtttttgctggaattgttgttatcctgttggatgaacttcttcagaagggttacggtcttggttctggtatctcactgttcatggctaccaacatctgtgagcaaatcttttggaagactttcgctccaactaccgtcaatcgtggtagaggtaaggaatttgaaggtgccttcatctcttttttccacttgattttgaccaagaaagacaagaagagagctctgttggagtctttctacagagacaatgctcctaacatgttccaagtcattgccaccttggtggtgttcttcaccgttgtttatttgcaaggtttcagactggagatcccagtcaagtctaccagacaaagaggtccttatggaacttacccaattagattgttttacacttccaatatgcctatcatgcttcaatctgctttgacttcaaacattttcattatttctcaaatgctgtactctcacttcccagacaacgctttcgttaagctgattggaacatgggaagctcaaccaggatctgcccaactgtttgccgcttctggtttggcttactacatgcaacctccaatgtcattgtcccaagctcttctggacccaatcaagacagttgtctatgttgtgtttgttctgaccacttgtgctattttttctaagacctggattgaaatttcaggatcctctccaagagatgttgctaagcaattcaaggaccaaggcctggttattgctggtcacagagatgctactgtctacaaggagttgaagaagatcattccaaccgctgctgcctttggtggtgctactattggtgcattgtctgtcgtttctgacctgctgggtactttgggttccggtacctctatcttgttggccgttaccaccatctacggttattacgagctggctgttaaagagggtggattttccaagggaggtccatctggattcgtcgatttgtaa

SEQ ID NO: 3340 - DNA, 1047 bp, Artificial Sequence
  Optimized genes for Pichia pastoris
atgcaagtcaagtctatcgtcaacttgctgttggcttgttccttggccgttgccagaccattggagcacgctcaccaccaacatgacaagagaggtgtcgttgttgtcactaagaccattgtcgttgacggttccaccgttgaagctactgctgccgctcaagttcaagagcatgctgaaacttttgccgaatctactccatcagctgttgtgtcttcttcctctgctccaagctctgcttcctccgcctctgccccagcttcatcaggttctttctctgcaggtaccaagggagttacttactctccataccaagctggtggtggatgtaagactgcagaagaggtcgcttctgacttgtcccaattgactggttacgagatcatcagattgtacggtgtggactgtaaccaggtcgagaacgttttcaaggctaaggctcctggtcaaaagttgttcttgggaattttcttcgttgatgctattgagtccggtgtttccgccattgcaagtgctgtgaaatcttacggatcttgggatgatgttcacactgtttctgttggtaacgaattggttaataacggtgaggctaccgtctctcaaatcggacaatacgtctccactgccaagtccgctttgagatctgccggtttcaccggtccagttctgtctgtcgacactttcattgctgttatcaacaacccaggtttgtgtgattttgctgatgagtacgttgctgtcaatgcccatgccttctttgatggaggtatcgctgcatctggtgctggtgactgggctgctgagcaaattcaaagagtctcaagtgcctgtggtggtaaggacgttttgattgttgagtctggatggccatccaagggtgataccaacggagctgcagttccatctaaatccaaccaacaggctgctgtccaatctttgggtcagaagattggttcatcgtgtattgccttcaatgctttcaacgactactggaaggccgatggtcctttcaacgctgagaagtactggggtattttggactcttag

SEQ ID NO: 3341 - DNA, 1074 bp, Artificial Sequence
  Optimized genes for Pichia pastoris
atgtctaaggcttctccagaaactacccacttgcttcatcacgatccatacgataagactgagagatctgctgctcaaaagtcttcttggaagaacactttgtacatcatttttgctactgtcgtttctgttccattactttatttgttcttggtttacttgccaaacttggctccagagtctgtctctgaacttccaattattcgtaaggttgataaactggacttttctaatcaattggaggtcccaagaagattgatcttgattggtgatgttcatggttctttgaaaccattgaagaagctgttgagaaaattggactacaacccaaagggatctactgacactgttcttttgttgggagatttcatctccaaaggtccacaatctgttgaagttgtcgatttggccatcaagaacaagttccaatgtattttgggtaaccatgagatttccgttttgcaaagatacaaccaattccacggtctttctggtctcaagtacagaaacaatgaatctgacattgagaactatgatcttcaatccggtcaactgtaccctttggatgatgagatgcgtcttgccaagcaactttacccaagacacatcgagtacatgggtacttgtccattcatttacgacttgggtcctgttcctagatataacagaaagcacaccaactacaaggagaccgttgacggtgttgctgtccatgctggtttgaactggaatgttcacgagttgtatgaccaagatgtcaccgaggttactgaaatgagagctatgttgcctcctgacttctccaaggccactgatgacaagtccattccaggttccgttggatgggctaagatttggaaccactggcaaaacaacattaccgattccgacgattttgatggtttaaagaatagaaaggtctactacggtcaccacgcttccagaggtctgaacgtcagaccttacaccatgggaattgacaccgcttgtgtcaagggtgacagattgactgctgttgttatcacttaccacaagggtaagatcagagagaagttggtctccgtcggttgttag

SEQ ID NO: 3342 - DNA, 1149 bp, Artificial Sequence
  Optimized genes for Pichia pastoris
atgtgtttgcaatctattgttattgaccttttgaccaatttccaggttctgaagtactggggtaagagagatactaaccttaacttgccaactaattcttcaatttctgttactctgtctcagaaggacttgagaactttgacaaccgtcaactcatcaagaaactttgagaaggattctctttacctgaacggtgtctctcactccattgagaatgacagaaccaccaactgtttggagcaattgagatctctgagacaacaactggaagaagatgacccaaatcttcctaagctgtcccaatggaagttgcacatcatttccgagaacaacttcccaaccgctgctggtttggcttcttccgcagctggatttgctgctatggttgccgctatctccaaattgtacgaattgcctcaagatgcctctgagttgtctagaattgccagaaagggttctggttccgcttgtcgttccatgtttggtggttacgttgcttgggaaatgggtgaaaagcttgatggtactgattccaaggccgttcaaattgctcctcctgagcactggccaaacatgaaggctgccatttgtatcgtttctgatttgaagaaagatgtttcttctacttccggtatgcaaactactgtccaaacctccgaactgttccaatacagagttaaccaagtcgtccctccaagatactctcaaatggtcgatgcaattaagaacagagactttgaaacttttggaactttaaccatgaaagactccaactctttccacgctacttgtttagactcttacccaccaattttctacttgactgacacttcaaagaagatcatcaagttgattcatacattgaacgatgctattggtaaagttgtcgctgcttacactttcgacgccggtcctaacgctgttatctactacgagtctgaaaatgaggaagttgttttgggtgtcttgttcggtgttctttctaacgttgatggatggaacgagatgaactccgccactcttaaggttcctgaaggtgttccattgtcctctttggactctaccatcgcttccggagtttccagagtcattttgactcaagttggtgagggtccaaaggaatctgacatgttcttggttgctccataa

SEQ ID NO: 3343 - DNA, 492 bp, Artificial Sequence
  Optimized genes for Pichia pastoris
atgaactcttccaagagatccatctccattccaagatctttttccaagctgttgtcttgtggttctttctccttggttgccgtttccgatgaatctttgactgccttcaacgacttgaagttgggtaagaagcacaagtacgttatctacaagatcaacgattctaagactgaaatcattgttgacaagatttcttcagatgagtcttacgacgctttcttggaagctcttccagaagatgactccagatacgctgtttacgatttccaatacgagatttcctctactgagggtaaacgttccaaaattattttcttcacttggtctccagagactgcttctgtcagatcaaagatgatttacgcctcttctaaggatgctctgagaagagctttgaacggtgtctccactgacattcaaggtactgatttttctgatgttgcttttgagtccgttttggagagagtttctagaggtgctggttcccattaa

SEQ ID NO: 3344 - DNA, 897 bp, Artificial Sequence
  Optimized genes for Pichia pastoris
atgcctattgaaatcaaaggtaacgatgtcgttatcacttcatcttccaccactcaaacccaagtcagaattaacctgtttggtgctactgtttactcttggactattgctggtaaggagcagttgtggacctctgatgctgctttgtttgatggttccaagcctatcagaggtggtattccattggttttcccagtttttggaaagtcttctgctccaggatttgagaaacttcctcaacacggtttcgccagaaactctacctgggaatttttgggacaaactcatgccaaccctccaactgtccaattcggtttgtctccagataacgtcaacagaaaggtctacaacaactgggacaacggtgacaatgaattctctgtcatttacaccattgccttggaagatgagcaattggtcacttccgtcgaaattcaaaacactgatcaaaaggaatggaagttcaactggttgttccacacttacttcttggttgatgacattgaggacactttgatcaacaatcttccaggtgaaaagtgtaacgaccgtgttgttcacgagatctacactgagaagcatccaattatttctttcgaccaagaagttgacagagtttattcagatgtttctactgacaagttgttgcagatcatcgagttgggtaaagtcaagcacaacatcaagagagtcaatttgccagacgttgtcgtctggaacccatggtctgagattgttaaagaggttgctgattttgaaccaaaggaaggttacagaagaatggtttgtgttgagccaggatacgttgaacaactgaagatcttgaagccaggtcaatcatggactgcttctcaaattttgcacaagggtgatgatatcaacttgcaagctatctaa

SEQ ID NO: 3345 - DNA, 603 bp, Artificial Sequence
  Optimized genes for Pichia pastoris
atgtctattccaccagaagttttgtgggctcaaagatccaacaaggatgacacttctaagaatgttgtttacttgactatcagaattgctgatccagagaacatcaaggttgacttgcaaccaggttctttagagtttgatgctgactccagaggttccaagtaccacttgtctttggagttcttcgacgaagtcgatgttgaaaagtctaaataccatactgctggatctcatttgttctttgttcttcaaaagaagaacgcttctgaagaattctggccaagattgaccaaggagaaggtcaagttgcattatttgcacactgatttcgatagatgggttgatgaagatgagcaagatggtgaggaggccgacccaactgttccagatccttctcaaggtatggacttctcttccctgatgaacaacgaggctctgtcccaatctctttcctctgatgccggtcaacctgacatggctgctttgatgcaacaattgcagaactctggtgctggtggtttgggaggtgaaggtgaccaagctttggacagagctttggaagaggactcttctgacgaggaagaggaagacaagcaagagtaa

SEQ ID NO: 3346 - DNA, 1089 bp, Artificial Sequence
  Optimized genes for Pichia pastoris
atgtctccagccatcaacattgctattatcggtgctggtatcgttggttctgccttcattaaccaattgagatccgtttcttccttgtttgactttaatgttatttacttggccaagtctaaatctgctttgatctcttacgacttcaaaccattgaatttggccaactggaaggctgacttggataactcttctttgaacccattgactgttgaagagcttctgaagtttttgaagaactcccccttgccagctatcttggtcgacaacacctcttcagctgatgttgcttttgcttacccacaatttgtttccaatggtatttccgtcgctactccaaataagaaggccttttctggagatctgaacttgtggtctgagattttcaaggcatccggtgagccaaacggtggtctggtttaccacgaggccactgtgggtgcaggtcttccagtcatttctaccatcaatgatcttgtcaacactggtgacaagatcgagaagattgagggaattttttcaggatctctgtcatacatcttcaacagattctccaccaccaagccaaacgatatcaagttctctgaaattgtttccaaggctaaggaattgggttacactgaaccagacccaagagatgatttgtctggtttggacgttgccagaaaggtcactattttggctagactgagtggtttcaacgtcaagtccccagattctttcccagttgactcattggttcctcaagagttggaaactttggagacttctgatgagttcttgtccagattgcacgaattcgactctcaagttggtcacttgaaggagcaagctgcttccgaaggtaaggttttgcgtttcgtcggtactgtcgatttccctaacaacaaggtgtctgttggatttggaaagtacgatgcttctcatccatttgcctctttgcaaggatctgacaacgttatctccattaagactgagagataccaaaaccctttgattattcaaggtgccggagctggtgctgaagttactgctgccggtgttcttgccgatgtcatcaaaattggtcaaagaatttcaaagttgtaa

SEQ ID NO: 3347 - DNA, 951 bp, Artificial Sequence
  Optimized genes for Pichia pastoris
atggctgacaatagagaggtcttggttctgagaggtactcttgagggacattctggatgggtcacttctttggccacttgtccaaccaacccagatattttgttgtcaggatccagagacaaaacattgattgtttggcaattgaacggtgatgaccaagcttacggtgtcccaaagaaggctttgaagggacactctcacatcgtttccgattgtaagctgtccttggactctgaatttgctctttcctcttcatgggataagaccgttagattgtggaatctgaaaaccggtgagatcattaagtacgctggtcatacttcagatgttctttctgttgacttgtctcaaaacttgagagttattgctagtgcctctcgtgacaagactatcaaactttggaacattgtcggtgaagaagttgctactttggaaggtcacaccgactgggttacctcagtcagatttgttccaggttctgcttccgacattatttccgcttcatctgacaagttggtcaaatcttgggatttgaatgaaatgaagttgactgctgatttcgttggtcacactggttacgttactgccatcactgtttctccagacggatctctgtgtgcttctgcaggtaaggacggttccatcatcttgtgggacttttctgtcaagaaggttttgtacactttggatgctaaggaagaggttcacgctgttgccttctctcctaacagattctggttgtgtgccgctacctccaagtctatcaagattttccacttggagaagagaaagccaatggatgagttgaaaccagagtttgtctccacttccaccaaggccagagatccacactgtatttctttggcttggtctgccgatggtcagaacctgttctccggttatactgacaacgttatcagagtctggcaagttatgacctcttcttcctaa

SEQ ID NO: 3348 - DNA, 1875 bp, Artificial Sequence
  Optimized genes for Pichia pastoris
atgtcctcatccaacaaggaatttgatggtgactccattggctctagtgactctttggatatcgagtctggtaacagagatccaaagactcaaaaccctcaagcttacgttccatctgacaatgaggacagaatgtctgaattgtctcactacgcatctaccccagaccaatctttgaaaatggtcagaactgagactaagaagtctttaaaagatttgggtgtttctgatgagctgcctactcttgacccaaacagaccaattgccgttgagaatccaatttttcctgaggagtactacttggagactgaaactggtttggtgccagttgccactttgcaagatcttggaagaaacccaactgctctagagaagttgagaaaggaaaaatctcgtgctttcccacaaccaaatggtgaggctccaatcctgaaggattcttcagatgtcgagactttcaagtccaaggagtattctcccgagattgagtttgtcaccttcttgatcaacgatcctgaaaacccatacaactggccaacctttaccaaatgggcctacactatcattctgtctatcttggttgttgctgttgctttcggttcctcttgtatctccggtgctctgttcaccgttgaagacaactacaatgtctctttggaagttgcaattttgactgtttccttgatggttcttggcttctctttgggaccattgttgtggtctccattgtccgaacaaattggtagaagatgggtttacttcatttctctgggtctgtacaccattttcaacattccatgtgctctttcccctaacatcggaggtcttttggtttgcagattcctttgtggtgtgttttcttcttccgctttgtgtttagttggtggttcaattgctgatatgcacccatccgagaccagaggtaaggctattgcatactttgccgctgctccttatggtggacctgttatcggtcctcttgtctgtggatggattggtgtcaagaccaacagaatggatctgattttctgggtcaacatgggattcgctggtttcatgtggttgctggtcgcttgtattccagaaacttaccaacctgtcattttgaagaacagagctaagaaattgcgtatggagcttaacaatcctaatatcatgaccgagcaagaggccaaccctttgaccttcaaagagttggtcgttacttgtttgtacagacctctgatgtttgtttttacagagccagttttggacatgatgtgtgtctacgtctgcttaatttattcattgctttacgccttcttctttgcttacccagtcatcttcaatgaactttatggatacgaagatgatttcattggattaatgttgattcctatccttattggagcctttttggctttagtcactactcctattcttgagtccatgtatgttaagatgtgccaaagacgtaagccaactccagaggatagattggtcggtgccatgattggttctcctttccctgccattgctttgttcatcttaggagctacttcttacaagcacatcatctgggttggtccagcttccagcggtatcgcttttggttacggtatggttctgatctactattccttgaacaactatattattgacacttatgctaagtacgctgcctctgctttggccaccaaggttttcctgagatctgccggtggtgcagctttcccattattcactacccaaatgtaccacaagcttggtttacaatgggcttcttggttattggcatttatttcccttgctatgatcttgatcccattcgtcttctacatttacggtgctagacttagagccaagatgtgtaaggagaactactctgagatgtaa

SEQ ID NO: 3349 - DNA, 2121 bp, Artificial Sequence
  Optimized genes for Pichia pastoris
atgtccaagtccgagagctacgagtttcaagccgaaatttctcaattactgtctctttttatcaacactgtttactccaacaaggagatcttcttgcgtgaacttatctcaaatgcttctgatgccttggacaagatcagataccaatctttgtctgaccctaaggtcttagaaaccgaacctgagctgttcattcgtattactccaaagcctgaagagaaggttttggaaattagagattcaggtatcggtatgactaaagctgacttggtcaacaacctgggaactattgctaagtctggtactaaggccttcatggaggctttatctgctggtgctgatgtttccatgattggtcaattcggtgttggtttttactcattgtttttggttgccgatcatgttcaagttatctctaaaaataacgatgatgaacaatacatttgggaatctaatgccggtggtaagtttaccgtctctctggacgagaccaatgaaaagcttggtagaggtactgtcttgagattgttcctgaaggacgaccaattggaatatttggaggagaagagaattaaggaggtcgttaaaagacactccgaatttgtttcttatcctattcaattggtggttacaaaggaggtggaaaaagacgttccagtcgaggaggaagaagagaagaaagaagaaacagaagaagatgacaagaagccaaagttggaggaagtcgacgatgaggaagacaaaaaggaagaggagaaaaaaatcaagaaggtgaaagagtctgttaccgagactgaggagttgaacaaaacaaaaccattgtggactagatccccttctgaagttactcaagatgaatacaacgctttctacaaatccatttccaatgactgggaggatcctttggctgtcaagcacttctctgtcgaaggtcagttggagttcaaggctattcttttcattcctaagagagctccatttgacctgtttgaatcaaagaagaagaagaacaatatcaaattgtacgttagaagagttttcatcactgatgaggccgaggaattgattccagaatggttgtcattcgtcaagggtgttgtcgattctgaggatttgccactgaatttgtccagagaaatgttgcaacaaaaccgtatcttgaaagtcatccgtaagaacattgttaagaaattgatcgaaactttcaacgaaatcgctgaagacaaagagcaatttgaaaagttctactctgcattttctaagaatcttaaactgggtgtccacgaggactcccagaacagatctgctttggccaagttgttgagattcaattctaccaagtctactgaggaactgacctctttctccgactacgtcaccagaatgccagagcaccaaaagaacatctactttattactggtgagtcagtcaaggccctggaaaaatcaccattccttgatgctttgaaggaaaagaactttgaggttctgctgttgactgacccaattgacgagtacgccatgacccaactgaaagagattgaagataagaagttagttgatatcaccaaagattttgagcttgaagagagtgaagaagagaagaaagccagagaggaggaagttaaggatttcgaacccttaaccaaggcattgaaggagattttgggtgacaaggttgagaaagttgttgtgtcttacaagctggttgactctccagctgccatcagaacttctcagtttggatggtctgccaacatggagagaatcatgaaggctcaagctctgagagacaccaacaccatgtcttcatacatggcttccaagaagattttcgagatctccccaaaatctcctatcatcaaggctctaagaaagaaggttgaagctaccggtaccgatgacagagtcgtcaaaaacttgaccaccttgttattcgacactgctcttcttacttccggtttcactttggatgagccaacttcatttgctgctagaattaacggtttgatttcaattggattgaatattgatgaagaagaagagaaggaaccagaacaggctactgaagccccatctgaggaggctgttgctgagtccgctatggaagaagtggattag

SEQ ID NO: 3350 - DNA, 375 bp, Artificial Sequence
  Optimized genes for Pichia pastoris
atgactttccacttctctatcattttccatatcagattcaccaacacttttttggacaacaccaagtccaaccaaattaaggttatcaagactcctggtggagttctgagagctcaacacactaagaagagaggtaccactccaaagtgtggtgactgtggtatctctttgccaggtgttgttgctttgagaccaagagagttttcaagagccaagaaatctgacaagtctgtttctagaccttacggtggttccagatgtggtaactgtgttaaagagagaattattcgtgctttcttgattgaagaacagaagattgttcaaaaggtcttgaaggagcaagctgagaaggaaaagcaagctgaacaaaactaa

SEQ ID NO: 3351 - DNA, 6648 bp, Artificial Sequence
  Optimized genes for Pichia pastoris
atgtcttccgtcaaccattctctaagacactccaagcttcctccacacttcttgggtttgaacagtgttgaggttgctgcaccttccaaagtaagagactttgttcgtgaccatggcggacactccgttattacccgtgtgttgatcgctaacaacggtattgctgccgtcaaggagatcagatctgttaggaaatgggcttacgaaacttttggaaatgaccgtgccatccaattcattgtcatggccactccagaagatctggaagccaacgctgagtacattcgtatggctgatcaatatgtgatggtgccaggtggtactgccaacaacaactatgcaaatgttgacttgattgtggaaattgccgagtctaccgatgctcatgcagtttgggcaggttggggatttgcctctgaaaaccctcatttgcccgaacaattggctgcttccccaaagaagatcattttcattggtccacctggtagtgcaatgagatccttaggtgataaaatatcatctactattgtcgcccaacatgctaaggttccttgcattccatggtctggaactggtgtggaccaagttatcattgatcctgtttccaacttggtctctgttgacgaagaaacttatgctaaaggatgttgttctgaccctcaggacggtcttgctaaggccaaagctattggatttcccgttatgattaaagcctccgagggaggaggtggtaagggtatcagaaaggtggatcgtgaagaggacttcttatccctttacgatcaggcagcaaacgagattcctggatcccctatatttatcatgaagttggcaggcgatgcaagacacctggaggttcaactgttagcagaccaatacggtaccaatatctctcttttcggaagagactgttccgtgcaaagacgtcatcaaaagattattgaagaagctccagtcaccatcgccaaacaggatactttcagacagatggaacaagctgctgttagattgggtcaactggttggttacgtgtctgccggcactgttgagtatttgtactcacacgctgaagacaagttctacttcctggaactcaatcctagattgcaagtagagcacccaactaccgagatggctaccggtgtcaaccttccagtggcccagttgctcattgctatgggaatacctttgaacagaattcgtgatatccgtgttttgtatggattggagccaaacggtgctactgagattgattttgaattcaagaccgaagagtctttgaaatcgcaaaggaagcctattccaaagggccacactattgcttgtcgtatcaccagtgaagacccaggtgagggattcaaaccatctggtggagctctgtacgagcttaacttcagaagttcatcatccgtatggggttatttctctgttggtaacaaatcttctatccattcattctccgactcccaatttggtcacatcttttccttcggcgaaaaccgtcaaattgctagaaaaaacatggttgtggcattgaaagaactttccatcagaggagatttccgtaccactattgaatatctgatcaagttgttggagacagccgacttcgagaataacacaattactactggatggctggacgagttgatttccaagaagctcactgcagagagacctgacgagactactgctatcttgtgtggtgctgaaaagggacagatacctggtaaggagcttttgagaaccattttcccaattgaatttatttatgagggtaagaagtataagtttaccgttgttcaggctgcttttgataagtacaacgtctttgttaatggttgtatgatcactgtctccgtgacccacctcaaggatggttccttgttggtagctcttgacggcaaatcccactctgtatactatttgcaggaggaagtaggtaacaccagactttcagtcgacggaaagtcatgtatcttagaggtcgagcacgagccaacggaattgcgtactccaagtccaggtaaacttatcaagtaccttgttgaacatggagaccacgtcaagatcggacaaccatacgccgaagttgaagtcatgaagatgtgtatgccattggtttcacaagagaatggaactatcagactgttgaagcaaccgggatcttcagtcgcagctggtgacattctggccattttagctttggatgatccatccaaggtaaagcatgccttgccatttgacggtacgattcctgatatgaaacaacctttcatccactctaacaagccagtttataagttcatctctttgctgtctgtcctgaagaacattttggccggatacgacaaccaagtcgtaatgaacgatacccttcaatctcttttggacgtcttgaagaacccagagctgccatattcagaatggaaccacagtatctccgctctacactcacgtcttccaattcatcttgatgaacagcttacctctttgatagaacgttctcaccaacgtggtgctgattttcctgcaaaacatttgctaaaattgttagacaaagagcaagctgtcaatccagatccattgttttctcaagtgattgcaccactaaccgccgttgcaaagtcttatgaacatggtctagaagttcatgaacacaacgttttcgcagatctcatcacccaatactacgacattgagtcattatttgctgacaagagagaggaggatgtcatcctgcagctgagagatgaaaataaatcttcgttggacaaggtcattgacgtggttttgtctcattccagagtgggagccaagaaccatctgattagggccattttggagatctaccaaaccatctgtcagaacgacttacaggccgctactatcctaaagaaaccacttaagaaaattgtggagctcgactctagattcacagcaaaagtttctttaaaggccagagaaatccttattcagtgctccctcccttcaattaaggagagatctgaccagctagagcacattcttcgttccagtgttgtccaaactcagtacggagaatcgttcaacggaaactacaagctgcctaatttggatgttattcaagatgttatagattcaaaatatatcgtgttcgacgttctgacccagttcgtcgtatctcctaacaaatatatttttgcagccgccgctgaagtctacttaagaagagcctatagagcttattctgtgagagaagtgaagcaccatttcgttggtgattctgctttgccaattgttgaatggaaatttcaacttccattattgtccaccgctgcctacaattccgttcccgaggccatgagaaattcttcctccaatagaagctccatttccatggatagagctgtctctgtcagtgacttgactttcatgatcaacaagaacgactctcagccactgagaaccggaatcatcatcccaaccaaccacttggacgatattgaggagagtttgtcgtctgccattgacgttttccctaagcgtccaagaaacaatggccctgctcctgacagaactaacgtcgctccagagcagccaactaatgtctgtaacgtatttatagccaatgtctcaggatataactctgaggctgagattgttgataagatttcttctgtgctttctgaactgaaagatgatttaagggcttctggagtacgtcgtgtcaccttcgtgctgggtgacaaagttggtacttaccctaaatactacactttcaaattcccagactactttgaggatgagaccattagacatatcgagcctgctctggctttccaattggagttaagaagactctccaactttaacatcaagcctgtccctactgagaaccgtaacattcacgtttacgaggctgttgccaagaatacatcttgtattgacagaagattctttactagaggtattatccgtacaagtagaatcagggaggatgttaccatttctgagtatttaatctcagaggcaaacagattaatgtccgatattttggacgccctggaaataatcgacacctcaaacactgacctgaatcatatttttattaatttttcagcagtcttcaacgttacaccagacgatgttgaagctgccttcggtggtttccttgagcgtttcggtaggagattgtggaggttgagagtttctgctgctgaaattagaattatgtgtactgatcctgaaacgggaattccattccccttgcgagcccttatcaacaatgtgtccggctatgttgttaagtccgaaatgtaccaggaagttaaaaatgatcacggtgaatgggtttttaagagcttgggaccaaccccaggttcaatgcaccttagaccaatctccactccttaccccaccaaggaatggttgcaaccaaaaagatacaaggctcacttgatgggtaccacctacgtctatgactttccagaactgtttagacaagccaccttatctcaatggaagaagtactctccaactgctagagtcccatcagatgtgtttgtcgccaatgagctaattgtagacgactccggtgaacttactgaggtatccagggaaccaggagctaacgttgttggaatggttgcctttaaagtcactgccaagacacctgaatatccaagaggtcgtcactttatcatcattgccaacgatatcacattcaagatcggctcttttggtcctcaagaagatgagtacttcaacaaggcaactcaattagctcgtaagttaggaattcctcgtatttacctgtcagctaattcaggtgcccgtattggtgttgctgaggagttgttacctttgttcaaggttgcttggaaggaagaaggaaaaccttctaagggtttcgaatacctctacctgacttccgaggacttgaccttgttggaaaagtccggtaaaagtaactccgtcacaacacagagaatcgttgaggaaggtgaggaaaggcatgtcattacagctattattggcgcatctgatggattgggtgtagaatgtttgaggggttctggtttgattgccggtgccacttcaagagcttacaaagacatcttcaccatcactcttgtcacttgtagatcagttggcattggtgcatacttggtgcgtttaggccagagagcaatccagatcgaaggtcaacccattatcttgactggtgctcccgctatcaataagctgcttggtagagaggtttactcctcaaatttacaactaggtggaacccaaatcatgtacaagaatggtgtttcgcacttgaccgctaatgatgaccttgctggagttgagaaaatcatggactggttggcttacgttccagctaagagaaacatgcctgttccaatattggaatcattgcatgacaagtgggatagggatgtcgattacaagccaaccaggaatgaaccttatgatgtcagatggatgatttcaggccgtgagacccctgatggtgagtttgaatctggtctgttcgatagtggttcctttacagaaacattgagcggctgggccaagggagtcgttgtcggaagagccagactgggaggtattccaatgggtgtcatcggtgtcgaaaccagagttactgaaaatctgatcccagctgaccctgccaacccagattccacagaaatgatgatacaagaggctggtcaggtctggtacccaaatagtgctttcaagactgctcaagcaattaatgacttcaataatggagagcaattgcctctgatgattctagctaactggagaggttttagtggaggccaaagagatatgtacaacgaggtcttgaagtatggttctttcattgttgacgctttggttgatttcaagcagcctatcttcacttacatccctcctaccgcagaattgagagggggatcttgggtcgtcgttgacccaacaatcaacgaagacatgatggagatgtatgccgatgtcgagagcagagctggtgttcttgaaccagagggtatggtcggtatcaaatacagaaaggacaaactgttggctaccatggaaagattggatgccaagtacgctgagctgaagtctaaagtgtcagacacttctctgagtgagaaggacgtttctgagatcaaaaagcaaattgagcaaagagagaagcaattgttaccaatctatgctcagatttctattcaattcgctgatttgcacgacagatcgggtagaatgttggccaaaggtgttatcaagaaggaattggagtgggttaactctcgtagatttttcttctggagagtcagaagacgtttgaatgaagagtacttgatcaagagaataacagagttcttgtctgcttcagccacaagactagacaagatttccagaattaactcatggcttcccacttcgatcgatttggaagatgaccagaaggttgccatctggttagaagagaacagaaaggctttagatgctaacataaaagaattacgtgctgagcatgttagaagaactttggccactttggtcagaacagacatggacactacatcaaagtctcttgccgagttgatcaacctattgcctgagactgaaaaagagtccattctcagcaagattaagagttga

SEQ ID NO: 3352 - DNA, 1698 bp, Artificial Sequence
  Optimized genes for Pichia pastoris
atgtctttctctccaagaattgtcccaactactgctttttctgaccagaagccaggtacatctggtctgagaaagaaggttaccgtttttcaacaaccaaactacacagaaaattttcttcaagctatcttcgactccatcccagagggagctcaagattctgtcttggtcattggtggtgacggtcgttactacaacgacactgttgttcaattgattgcaaagatcggtttggccaatggagttaagagaatcattgtcggtcaaaacggtattttgtcaactccagccacctctcatatcattagaacttacaaagacgttaaaccaacaggtggaattatcttgaccgcttctcacaaccctggtggtccaaccaacgatttgggtatcaagtacaatctttccaacggaggtcctgctcctgagactgtcaccgataagatgtttgctaaatctttggcattgactgaatacaagattattgaaaacttgcctaccattgacttgtccaagctgggactgtccaaatgtggacctttggaggtcgacatcatccactctactgaggcttacgttgagatgttgaaggacatttttgacttcccattgatcaagtcttttatcaaaagaagatctcctgaaggtttcaaagttttgtttgatgctttgaatggtgtcactggaccatacggtaagtcgattttcattgatgagctgggtttgccagagtcttccattcagaactgtgttccaaaggctgactttggaggattgcacccagacccaaatttgacctacgccaagactttggttgatagagttgacaaggagaacattgctttcggtgctgcttcagatggtgatggtgacagaaacatgatttacggagcttccactttcgtttctccaggagactctgttgccattattgctgagcacgctgaatctattccttacttcaagaagttaggtgttcacggtcttgctagatccatgccaacttctggagccttggatcttgtcgctaaggccaagggtctaaatgtttacgaagttcctactggatggaagtttttctgtgctctgttcgatgccaaaaagctttctatctgtggtgaagagtcctttggtactggttcagaccacatccgtgagaaggatggattgtgggctattgttgcttggttgaacgttcttgccgcctttgacgcccaacatccagaaattgaaggtggtgctactattgccctggtccaaaagaatttctgggaaacttatggtagaaccttcttcaccagatacgactacgagggttgtgagtcaattccagctaacaagttgattgagttcttgcaggagaaagtcgatgacacctccttcgttggttctgagttggctccaggttacaccgtcaaggaagctgccaacttctcctacactgatttggacggatctgtttcctctaagcaaggtttatttgtcaaattcacttcaggattgagattcatcgttcgtctgagtggtaccggttcctccggtgccactatcagattgtacttggaaaagcacacttccgacaagtccaagaactctctgtctgcctctgaatttttagctgatgatgttagatttgttctgaactttttgcaattccaaaagttcgtcggaagagaggagccagatgtcagaacatag

SEQ ID NO: 3353 - DNA, 324 bp, Artificial Sequence
  Optimized genes for Pichia pastoris
atggctgaggaaaacagattgtacgtcaagggtaaacatgtttctttccaaagatccaagtctgttattcatccaaagacttctttgatcaagattgaaggtgttgagaactctaaggatgctgaattctacattggtaagagaattgcttacgtttacaagggagttaaggctatcaacggtaccaaggttagagtcatgtggggtactgttaccagaactcacggtaactccggtgtcgttagagctaagtttgagagaaacttgccaggtcaatcttttggttctactgtcagaatcatgttgtatccatccaacatctaa

SEQ ID NO: 3354 - DNA, 1251 bp, Artificial Sequence
  Optimized genes for Pichia pastoris
atgtctctttccaacaaactttctgtcaaagatttggatgttgctggtaagagagttttcattagagtcgacttcaacgtcccattggatggtgataagatcaccaacaaccagagaattgtcgctgcccttccaaccattcaatacgtcctggaccacaagccaaaggtggttgtccttgcctctcacttgggtagacctaatggagaagtcaaccctaagttctctttgaagcctgttgcagccgagttgtcttctctgctgggtaaaaaggtcaccttcttgaacgattctgttggaccagaagttgaaaaggccgttaactctgcttccaatggtgaggttattcttttggagaacttgagattccacattgaggaagagggttctcaaaagaaggatggacagaagattaaagctgacaaggaagctgttgccagatttagaaagcaattgaccgctttggccgatgtctacgttaatgatgcttttggtactgcccacagagctcactcctcaatggttggttttgaacttgagcaaagagccgctggtttcttgatggccaaagaattgacttacttcgctaaggctctggaaaacccagtcagaccatttttggcaattttgggaggagctaaagtttccgataaaattcagttgattgacaatttgttggacaaggttgattccattatcatcggtggtggtatggctttcactttcatcaaggttttggacaacgttgccattggtaactccttgtttgatgaggctggagccaagctggttccaggattggttgagaaggcaaagaagaacaatgtcaagttggtcttgccagttgactttgttactgctgatgccttctccaaggacgctaaagtcggtgaagcaactgtcgagtctggtattccagacggtttgcaaggtcttgacgccggtccaaaatccagagagctgtttgccgccactattgctgaggccaagactatcgtttggaacggtcctccaggtgtctttgagtttgacaagtttgctgaaggtaccaagtccatgttggctgctgctattaagaatgctcaaaacggaggaaccgtcattgttggtggaggtgacactgctactgttgctaagaaattcggtggtgccgacaaactgtctcatgtttctactggtggaggtgcttctttagaactgttggaaggaaaggagcttcctggtgttgtttacttgtctaacaaggcttaa

SEQ ID NO: 3355 - DNA, 861 bp, Artificial Sequence
  Optimized genes for Pichia pastoris
atgtccaaccaatacaacccatacgagcagaaccagtcttatgagttgccatcttacaagggtggtaacaacgatgatttcgtcaagttcatgaacgaaattgctgatatcaacgctaacttggacaactatgaagagcttgttaagattattgagcaaaagcaaactcaattggttaacgaggtcaaccctgaccaggagaactctctgaagagacaacttgactccctgatttctgaatcttcttccttacagttgtctttgaagtccaagatcaagaacgctcagcaattggccattggtgactctgctaaggtcggtcaagccgagacctctcgtcaaagattcttgcaggctattcaagactacagaatcattgagtctaactacagagagcagcagagagttcaagctgagagacagtaccgtgttgtcaaaccagatgcttctccagaggaggttagagatgccatcgatgacttgggaggacaacaagttttctctactgctctgttgaacgccaacagaagaggtgaggctaagactgcccttcaagaagttcagtccagacacagagaattgcaaagattggagaagaccatggctgaattgacccaactgttccacgacatggaagaaatggttgttgaacaagatcaacacgtccaagagactgagaatctggttgacaccgctcaacaggatattgaaaaggctgttggtcacactgacaaggccttgacttctgccaagaaagctagaagaaagaagtgtatctgtttctggatttgtgttttgatcatctgcattttggctttgattcttggtttgggtttcggtgttggaaactggggtcgttaa

SEQ ID NO: 3356 - DNA, 1035 bp, Artificial Sequence
  Optimized genes for Pichia pastoris
atgaaccagattgagcaatctggtcctattgactgttcttctttaaagcttggttccagaaagtctgctttggccatcattcaagctgaaattgtcagacaactgattttgaaagagtacccagaactggaaaccaagctggtttctgtctccactttgggtgaccaggttcagaacaaagccttgttcactttcggtggtaagtcattgtggactaaagaattggaaatgttgctgttagagtcagttggaggtttcgaccaaattgatatgattgttcactctctgaaggacatgccaactcatcttccagacgagtttgagctgggatgtattattgaaagagaagatccaagagatgctttggtcgttcaagatggtctttcttacaagtccctggctgatttgccagagggagctgttgttggtacttcttccgtaagaagatctgcccaattgttgaagaatttcccacacttgaagttcaagagtgttagaggtaacttgcaaaccagattgagaaaattggacgacccagattctgaatactgttgtcttttgttggcagctgctggtttgattcgtactggtttacaacatagaatttccatgtatttgaacgatgatgttatgtaccactccgtcggtcaaggtgctctgggtgttgagattagaaagggtgatcaattcatgaagaacatttgtgagaagatcggtcacagaactaccactctgagatgtttggctgagagagctcttcttagatacttggagggtggatgctccgttccaattggtgtctctaccatctactctgaggacactaaggagttgaccatgaattctttggttgtgtcttgtaacggtagagactctgttactgagtctatgactgaagttgtcaccaccgaagaacaagccgaagactttggtgagcgtcttgctcaaaagttgatcgaccaaggagccaagagaatcttggatgagatcaacttcaacaagattaaggaaatcaaggaggaaggtctgcattag

SEQ ID NO: 3357 - DNA, 792 bp, Artificial Sequence
  Optimized genes for Pichia pastoris
atgtcagcttccacttactcttttgaccaagctatggattttgatatcgttcaatctgtcacttctacccaagatcacattcctatggttcttggtgagtctgtgttgagatcctttgtcggtaacgatgccaacaaggctccagctatcaagcaggagtacgaggctttgccattgaacgctcaaattgtcaacccagagttgactccttctgttggaactatctctcctctggagatccacacttccgttttggactctgtcttgtctactgacttcactgatgctgacaactctccaatgtttgagtccccagaatctgaggacccaaacaactgggtttctctgtttgctgatgaaactactttggctaccactccagccgtctccagagctcctgctgcctctgcttctccagtcgttccatctttgaagactacctctggtgatgagcaacaactgactgttaagcaattcgtcgaatacccatccgctaaggacaagttgtcaccaaagtccgtcgagaagaagatttctttcaagaaagaccacttgggtgttgttggttacaccagacgtcaaagatcttcccctttggccccaattgttgtcaaggatgacgatccagtttccatgaaacgtgccagaaacactgaagctgctagaagatctagagccaagaagatgaagagaatgtctcaattggaagataaggttgaagagctgttgatctgtaagtctgaattggaggctgaagttgagagattgaaatccttggtcaaacatcagtag

SEQ ID NO: 3358 - DNA, 561 bp, Artificial Sequence
  Optimized genes for Pichia pastoris
atgggtaaagttcacacttccaagcaacacgtcaagacttctcacagaaaggctccaaagtctgaaaacacttacttgaaatctttggttgagttgtactcttacctggccagaagaaccgatgctgagttcaacaagaaggttagaagagctttgaacttctccaaaatcaacagacctccagtttctgttggaaagatttctcaagccttgaagaaggaagagaatgctggtaagattgttgttgtcgttggtactgttactgatgatatcactcttttggagtttccacaagctaccattgctgctctgagagtcaccgctactgcaagagccaagatcctgaaagctggtggtgaaattttgactttggaccaattggccctgaaggctcctcaaggtgagaacaccttgctgttggctggatccagaactgctagagaggcttgtcgtcactttggtttcggtcctcaccaaaagaaagccccaagaatcttgtctactggtagaaaatttgagaaggccagaggtcgtagacaatctcgtgctttcaaggtctaa

SEQ ID NO: 3359 - DNA, 1155 bp, Artificial Sequence
  Optimized genes for Pichia pastoris
atggatattgctttggaaatcttggacactttcgtttttgataaggtctacgccaagttgcttcctatttctttggttcaacatttgccagatggatatttgaaaactttgggtcacttgactggtgccaacaacaccatggagtctttatttggtattgccccaaacgttgaccaagcatccaagaatcattggttgagaactgtcaacgattctatcgccttggccagaccaggtgagagacttgtgtacggtgttaatgctccattgcacttcttcgatgagaccgcttacacttacgcttctattctgggtagatccaacattatcagacaattcaccactctgatgattttgatgatcctgtttggatggggtctttacctgtctgttgcctctttctcttactactttgttttcgacaaagccattttcaaccatccaagatacttgaagaaccaaatgtctctggagatccaccaagctctgactgctattccaactatggttttgttgaccgttccatggttcttgattgagctgagaggttactctaagctgtactttgacgtcaatgaatctaccggtggttggaaggctatcatctggcaaattccttgtttcatcatgttcactgactgttgtatttacttcattcatagatggttacactggccatccgtttacaagagactgcacaagcctcatcacaaatggattgtctgtactccatttgcttcccatgctttccacccagtcgacggttatgctcaatctcttccataccacttgtacggtatgttgttcccacttcacaaggtttcttatcttattcttttcggtttggtcaacttctggactgtgatgattcacgatggtgaatacctttccagagacccaattgttaacggtgctgcttgtcacactgttcaccacctgtattttaactacaactatggtcaatttaccaccttgtgggacagattgggaggttcctacagaatgccagacaaggagttgtttgacaagaacaagaagaaggatgttaagacttggagatctcaagtcaagcaagccgactccattagagaagatttggagggtaaggaagacttcagagagtacggaactgaggagaagcttaagtctacatga

SEQ ID NO: 3360 - DNA, 237 bp, Artificial Sequence
  Optimized genes for Pichia pastoris
atgccaagacaaattactgatatcaagaagtttgttgagttgaccagaagagctgatgtcaagtctgctactgttaagaccaactccaagttcaactctaagggtgagaagtaccaacaaactaaattcaaggtcagaggtgctagatacttgtacactttgattgttgaagatgctgacaaggctaagaaattggttcaatctttgccacctcaattgaaggttaccaagttgtaa

SEQ ID NO: 3361 - DNA, 582 bp, Artificial Sequence
  Optimized genes for Pichia pastoris
atgccaagagccccaagaacctactccaagacttactctgttccaaagaccccttacgactctgctagatttgaccaagagttgaaacttgctggtgagtacggactgaaaaacaagaaggagatttacagaattggtttccaattgtctaagattagaagagctgccagagacttgttgaccagagatgagaaggaccctaagcgtttgtttgagggtaacgctttgatcagaaggttggtcagaactggtattttgtccgaagaaaagagaaaattggactacgttttggccttgaaggttgaagatttcttggagagaagattgcaaactcaagttttcaagttgggtttggctaagtccattcatcatgctcgtgtcttgatttcccaaagacacattgctgttggtaagcaaattgttactattccatctttcatggttagactggagtctcaaaagcacatcgactttgcttctacttctccatacggtggaggtcgtgccggtagagtcaagagaaagaaccaagccaagtcttctgaaggtggtgctgaggaagaagaggaagacgaggagtaa

SEQ ID NO: 3362 - DNA, 936 bp, Artificial Sequence
  Optimized genes for Pichia pastoris
atgattttcaacttgaagactcttgctgccgttgccatctccatttctcaagtctctgccgtttcttctttgggttttgctctgggtaacaagaacgtcgatggtacttgtaagtacttggccgactacgaggccgatttggacaccatccgtggtggttccgaggcagttgctatcagagcttactcagctgaggactgtaacactttacaataccttggtcctgctgttgaagagaagggattcaagttggtcttgtctgtcagaccattggatgagtcttactaccaagctgaaaagaacgccttatctgaatatttgcctcaactgtctgtgtctactttgcaattcctttctgttggatctgaggctttgtacagagacgacttgccagcttctgaccttgcagacaagattcgtgacatgaaggagttcttggctggtttgactgataagaatggagactcctactcctccgttccagtcggaactattgattcttggaacgttttggttgatgcctctgctgctccagccattgaggcttccgatgctgtttacgccaacgctttctcatactggcaaggtcaaggaccatccaactccacttactctttctttgacgatatcatgcaagctcttcaagttattcaaactatcaagggttctaccgatattgacttctgggttggtgaaactggatggccaactgacggtgataacttcggtgacgctgtcccatctattgaaaatgctgacaacttttggaaggaagctatttgtggtattagaggttggggtatcaacacctttgttttccaagcctttgatgaagactggaaagaagaagatgacgccgttgagaaccactttggtgtttgggactcttccagacaattgaaacttgattccttgggatgtgatttctctagttga

SEQ ID NO: 3363 - DNA, 870 bp, Artificial Sequence
  Optimized genes for Pichia pastoris
atgttcagactgtctgttgccaatattgctagatctgctggtgcctctacccgtaactacgccactttgagagagattgaaatgagattgaagtccatcaagaacattgagaaaatcaccaacaccatgaagattgttgcttctactagattgaacaaagctcaaagagctatggctacttccagagtttaccacgaaggtgaccaagaggttttcactactgctgaaactaaggctccagaagacgctgagaagactcttctggttgtcgtttcctctgacaagggtctgtgtggttccattcattctcaaattgccaagtctgccagacttcgtctgaaggacttgcctaatgccgatgttgttaccatcggtgataagaccaaggttcaattgctgagaactcatccaaacaacgtcaagctgtccttcaacggtattggtaaggaggccccaactttctacgaggctgctttgatcgctgatgagattaagaagttgggtgactaccaaaagatcgaggtcctttacaataagtttgtttctggtgtctctttcttgccatctgaattctctgtcttctccaccgatgccatcaaggcctccgaaaagctttccacttttgaagttgacgaggatgctgaaattccagctaccttgtctgagtacggtttggccaactctatcttgtccgccttggctgacggttacgcttcagagatctctgcaagaagaaacgccatggacaacgcttccaagaatgctggagacatgatcaacaagtactctattttgtacaacagaaccagacaagctgttattaccaatgaattggttgatatcatcactggtgcttcttctttggactaa

SEQ ID NO: 3364 - DNA, 279 bp, Artificial Sequence
  Optimized genes for Pichia pastoris
atgtcttctttcttggacagatggttgtacagaatgagaggtacttccaacactggttcttactactctactccacaattgtctaccagatcttctggtttcccagatgatgaccctcaaaccaccactcctaacttgagaaacaccccaagagcttacttccacccagtcattccaggtgacccattgactgaggaagagtctttgaagatgaagaagtcttccgttgactccagaaagtcctctgttgtttctgcttcttctgaggagaacgagtaa

SEQ ID NO: 3365 - DNA, 438 bp, Artificial Sequence
  Optimized genes for Pichia pastoris
atgaacttgccagtcaatgctgagagaaaaaagagaattttgaagtcttactcatacagaggtattgacttggaggctttgttgaaattgtccaacgaagagtttggaaagctttgtacttcttctgtcagaagacgtttctctagaggacttggtgacagagaggaaagattcttgaagaagctgagagtcgtcaagttggctactccaccaaacgagaagcctgctgttgttaagactcacttgagaaagatgatcgtcgttccagagatgattggttctgttgtcggtgtctacaacggtaagattttcaacactgttgagatcaagccagaaatgttgggtcactacttgggtgagttctccatgacttacactcctgttagacacggtaaggctggtgttggtaacgctgctagatttgctgccctgaaataa

SEQ ID NO: 3366 - DNA, 171 bp, Artificial Sequence
  Optimized genes for Pichia pastoris
atggctcatgagtctgtttggttctctcatccaagaaactacggtaagggttccagacagtgcagagtttgtgcttctcaccaaggtttgatcagaaagtatggtttgaacatttgtcgtcaatgtttcagagagagagctaacgatattggtttccacaagtacagatag

SEQ ID NO: 3367 - DNA, 993 bp, Artificial Sequence
  Optimized genes for Pichia pastoris
atgtcagcttcccaattcatgaagcttccatctttgcaaccatcttctgaacaaaacgctttgcctccattgagatcgttggctgctggtctgttcccaactagactgatgtccgaaaactccttgtccatgcaacacaacagttctgctttcttggactcttactctctttctagaggttctttgtctccaccaatgtctcaaggtttggaatctattggtagaagaagccttccttccttaccaaccttctctttcggtgatgttagaaataactcattgacttccacttcttccagagcctcttcactttccggtgacgatgtcgagtcaaccccatcagttccaaactctcctggttcaattcatgctccaggttccatctctagtttgcgtggtaagcgtagacaaagatctggtccttcttgtgatgcctgcagagtcagaaaggtcaagtgtgatgctgagatcatcatttctgactaccaagatttgtccattgatgaaaagttgatgtttgacaagaacactcaagacaaccaaactttccaattgtccaacggtttcactattttgaagactttggtcaacattaagtcatcaagagacgagaagtatatcaagtacagatcctgtactgcttgtaacaacagaactttgaaatgttgtttctccaagggattcaccagaaacgatattgttaaatacaacaagttcaagtccgagtcttctgatgaggaatgttccgttgccaagagagctaagaccgctcaaaccactccacctccatccaccaacttcgactccagttcctcctctctgtccccaaagtctactttaacagctccttcatctgttactcctcctttgttgccagctagaagaagttcatgtttgaactgtcgttctaagaagatcaagtgtgccagattggaggattctgagagatgtacccactgtgacaaaaaggacttgtgctgttcttttgaatag

SEQ ID NO: 3368 - DNA, 4971 bp, Artificial Sequence
  Optimized genes for Pichia pastoris
atgtcttctgacatcccaattgagttcaccgagccactgcaacttactgatatcggaattcagcctcagttcttggactttagatccactactcttgagtcagacagatttgtttgtgttagagagcaaggagccaatggtaacactgtttcgattatcgatctgcacaacaataacaacgtcacaaagaagaacatgaccgcagacaatgctatcatgcacccatcacaaaacgtcatctctttgcgtgctaacggtaccactttgcaaatttttaacttggacactaagcaacgtttgaaatcttttaccatgtccgagccagttatcttttggaagtggttgaacgagcagaccctgggattagttactcaaaatgccatcttcgaatggaatgtcttcgacggtacaggtgatggtccagtcagactggccgacaaacatgtgtctttgactaacaaccaaatcatcaactatgtttcaaacaaagataacacctggattgctgttaccggaatcgctcaagaggaaggtagaatcgttggacacatccagctctactcaaaagcaagaaatatttcccaggctattgatggccacgtttgtaactttgccacactgaaactttcaggtgcctctgtcgatacccaagttttcgtctgtggaaacagaaccgctaccggtggtcaattgcatgtcattgagatcgaccaccaagagggagcacctgtatttcaaaaaaagaatgttgacatattctttccagcagatgctgctaatgatttccctgtttccgtccatgtttctcaaaagtacggtatcatttacctgttgaccaagtatggtttcattcatttgtatgatgtggaatcctctacttcattgtttgtcaacagaatcagtgctgagccagtgtttactgctgcttcatacaacaacggaaccggtattattgctatcaacagaagtggccaagttttgaccgttgacctttctcgtgaatcatttatcccttacatcttgaacaaactcagtaacattccattagccctatctttggcttccagatctggattaccaggtgctgagaacttgttcactcagcaattcaaccaatgtttagcttccggtgactacgataatgctgcaaagattgctgcctccagtgaacagctgagaacttctgagactattaatagattgaaaaatttacaaccagctccaggacaaatttctcctatcctgtcctacttctccattcttctggacaagggtactctaaataagttcgagtccattgagctggctaagccagttttgcagcaggacaagaaaccactatttgagaaatggcttaaagaggacaagctacaatcctccgaagagttaggagatattgttaaaccttttgatactaccttagcattggccgtttacatgagagcccaagttccagtcaaggtcgtttcttgtttggcagaaattggtcagtttgataagatccttccttattgtgagaaggttaactaccatcctgaatacactatattgattcaaaacattgttcgtgttaatcctgacaaggctgcggagtttgctacttccctgcttcgtcaaactcctggtttagacattgaaaagattgctgacattttcttgtcgcagaattatattcaacaaggtactgctttcctgctggatgctttgaaggatgacaagcctgctgaaggtcacttgcaaacaagacttttagagattaatctcttgcacgctcctcaagtcgctgatgcaattctaggtaataacatgttctctcaatatgatagacctactatcgctgctttggctgaaaaggcaggacttttccaaagagctctggaacacttcgacgacatcaaggacattaaaagagttatcgtgaatacacaggccttcccaaccgactggctggttaactatttcggtaagttgaacgttgagcaatctgtggcttgtcttagagaaatgttgtctaagaacatcgcacagaaccttcaagtcgtcatccaagttgccaccaagtacagtgacttgattggtcctgtcactttgattaaggtttttgaagaatttaagtgtactgagggtgaatattactaccttgctagcattgtcaatgtgacacaagaacctgaagttgttttcaaatacattgaggccgctgccaaattgggtcaagtgaaagaaattgagagagtcaccagagagaacaacgtttacaatggagaaaaagttaagaacttcttaaaggaggctaaactagatgatcagttgcctttgatcattgtatgtgaccgttacgacttcgttcatgacttagtcttgtacttatacaagaacaagtttttcaagttcatcgaggtctacgttcaacaggtcaacccttctaaaactccacaagtaattgccggtctcttagatgtcgactgtgatgaggctatcatccaatcattattacagactgtcattggccaggttcctattgccccattggttgaagaggttgagaagagaaaccgtctgaagctgttacttccatttttagaacaaacccttcagggtggatctgctgacaagacagtttatgacactttggccaagatctacattgactccaacaataatccagagaaatttttgcaagataacgacaactacgacaccttggttgttggtaagtactgcgagaagagagatccttatcttgcttacattgcctactccaagggacagaacgacgaggaactgatcaaaatcaccaatgaaaacgccatgttcaagtatcaagccagatatttgttgagtcgttctgacagacagttgtggagtgttgtcttatctgaagacaatatgtacagaagacaattaatcgaccaggttgtgggaactgccattcctgagttggaggatccagagcccgtctctcttgccgtcgaagctttcatggacgccgatttgccatcggaattaattgaacttttggaaaaaattattttggagccttccccattcaatgacaacccatctctgcaggaattgctgattttaactgcaatcaaggctgatcaaactagagtggactcttatatcgagaagcttgacgattttgacccagaggaaatcggatccttggccactgaagcaggtttgtatgaagaggcatttaaagtgtacaacaagtttgagttgtacggaaaagcccttaaggtgttggtcgaggacgttatgtcattggatagaggtgaggagtacgccgagaagttggacaagccagaactatggtcccaattgggtgctgcccagttaaacggtctacgtatccccgaggctattgaatcttacatcaaggctggtgacccttcaaattttgaacaggtgattgatatcgccgaacatgctggaaaggaggaggagctaattcctttcttgaagatggctcgtgagacgttgagagaaccaaaggtggatggagctataatcaacgcttatgccaacacagacaggctgaacgatattgagcactttctacagctttccaatgcagccgatttggaaagtattggagacaaattatacgagaagcacaattacgaagctgctaagttgttgtactcttccatcagcaactactccaagctggcatcaactttggtctatctgggtgactaccaagctgctgttgattgtgctagaaaagcttctaatgtcaaggtttggaaacaagtcaatgaggcctgtattgacaacaaggaattcagattggctcagatctgtggtctgaatcttatcatccacgcagaggaattggatgagttggtaaacaaatacgagtattttggttactttgaccaattgttgtcactgtttgagaatggccttggtcttgaaagagctcacatgggtatgtttacagagcttgcagttctgtacaccaaatattctccagataagactatggagcatttaaaactgttctggtcacgtattaacataccaaaagttttaagagcatgtgaagccgcccacctttggccagaattgatcttcctttactgtcactacgatgaatgggataatgccgctcttaccattatcgaacgttcctcatcagcattcgagcactcctctttcaaggaagtcattgtgaaggtctccaacctggagatttattataaggccatcaatttctacttgaatgaacatccatccctactgactgacctgttgtccgtgatgattccaagaattgatttacctcgtgtcgtcaaattgttccagaagtccgacaatttgccacttgtcaagccctttttgatctctgttcttgataaaaacaactctatcgtcaaccaggcatatcatgatcttcttattgaagaagaagattacaagtctttaaggtccgttatagagtctaacgataaattcgatgccttgggattggctgagcgtctagaaaagcatgaagttattttcttccgtcagattgcagctgtcctttatagaaagaataaaaaatggaacaaggccatttcaattctcaagaccgatcgtttgtggtctgatgttattgaaacagctgctatttctggttctgaaaaggttgcttctgagacattgcaatacttcgtagaaactggtaacaaggaatgtttcgttgctactttatatgcttgttaccacttggtgaaccctgattctattttggagctgtcttggttacacggtttaggtgattatactaaaccatatgagatctccatagccaagaacaatcaagacagaattaacgaactttacaaagacttgaagaagcgtcagtctcaggagaccaacgctgatgacgaacaagctggttcccagagattgcttttgactaatggaactggtatcggtttgcagccaactggaacaggattcggaggattttag

SEQ ID NO: 3369 - DNA, 513 bp, Artificial Sequence
  Optimized genes for Pichia pastoris
atgtccagaaacttccaaactgttaagagaggtgaccgtttcccaaccgatgctaccatgttccacattccatcttctggaggtggtccagctcctttcaacctgagagaaactgtccaaggtaaaagattcattgtcgtcgctgctccaggtgctttcacttccacttgtcatgaagagcacttgccaccatacatcaagaaccttccaactttcttgaagaagggtattgactttattttggttatcactgccaacgatgccttcgtcttgaactcttggaagaaggctctgggagctgattctgacaagattatttttgcctctgataccaacttggagttggctaacaagttgggtttgactttggacttgtctgttgctggtcttggtcaaagaactggtagatttgctttgattgttggtaaggatggtgttgttcaaaacgttttcgctgagaagggaccagaggtcaagcactcctctgctgacagagttttggccaagttgtaa

SEQ ID NO: 3370 - DNA, 942 bp, Artificial Sequence
  Optimized genes for Pichia pastoris
atgcacagaacttactctttgagaaactccagagctcctactgcttctcagatcaactctccagctccacctccttcttctaccaagcagaacagattcttcggtaagggttccttgtccaacactctgagaagacaaactgccggttcttttggtccagagctgtccaagaagttggctcaattggtcaagatggagaagaacgttatgagagccattgaatcctcctcttacgagagaaaggccgttgccaagcaactgtcattgtggggtgctgaaaacgatgatgatgtctctgacatcaccgacaagttgggtgttttgatttatgagattggtgaattggatgaccagttcattgacagatatgatcaatacagaatcactttgaaaggtatcagagatattgagggatctgttcaaccatctagagaccgtaagctgaagatcacagaccaaattgcttatttgaagtacaaggatcctcaatctccaaagattgttgttctggaacaagagcttgttagagcagaggctgagtctttggttgctgaagctcagttgtctaacattaccagagagaaacttaaggctgctttcaactaccactttgactctactagagaacactctgaaaagcttgcattgatcgctggttacggtaaagctctgttggagttgttggacgactccccagttactccaggtgaaactagacctgcttacgatggttatgaatcttccaaacaaatcatcattgatgctgagaatgctttggcctcttggactttggaaggagctgccgtcagaccaactctttccattagacacgttgaaggtgagtacgacgatgaagatgttgagggtttgaacgaagacactgacaacttgcacttgactgaggaagaatggcaaaaggagcaacaagtccaaaacgcttaa

SEQ ID NO: 3371 - DNA, 1614 bp, Artificial Sequence
  Optimized genes for Pichia pastoris
atgtcctccactgatattcaaggcgaccaaggtgacaacgaaaagatttatgctatcgagtcttctccttccaatgaacaaattaaggacatccacgaggctcctgctgataacaaatctgaattggacattccagttaagcctaagggatcttacattttggtttcagttttgtgtttacttgttgcttttggaggtttcgtcttcggatgggacactggtactatctccggatttgtgaacatgtctgacttcactagaagatttggtcaattcaacggtgagacatactacttgtccaaggtcagagtgggattgatcgtttctatatttaacattggttgtgctatcggtggagtcactttgggtaagttgggagatatctggggtagaaagaaggctctgatgttcgtgatggtcatctacatggtgggtatcctgattcagatcgcttccattgacaaatggtaccaatatttcatcggaagaattattgcaggtttggccgtcggtgctgtttcggttctgtcaccaatgtttatttccgagacttccccaaagcacatcagaggttctttagtttcttgttaccagttgatgatcactgctggaattttccttggatactgtaccacctacggtaccaagacttacactgactctactcaatggagagtccctttgggtctgtgtttcgcttgggccatcttaatgattgtcggaatgacttttatgccagaatctccaagattcttggtcgaggttaacagagttgatgaagccatgaagtctattgctagagtaaacaaggtttccatcgatgacccatctgtttacaacgagatgagactgatctctgatggtattgagaaggagaaagaggccggttccgtctcttggggagagttgttcaccggaaaaccaaagatcttctacagattgttgattggaatcttcatgcaatctttgcaacaattgaccggtaacaactacttcttctattacggaaccactattttcaaggccgttggattggatgattctttccaaacttctatcatcttgggcgtcgtcaactttgcctctaccttcctgggtatttacaccatggacaagttcggtcgtagaagaactcttcttggtggttccggtgcaatggttgtctgtcttgtcattttttcttccgttggtgtcaagtccttgtacgagaatggtaaagacgatccttctaagccagctggtaatgctatgattgtttttacttgtttgtttatctttttcttcgcttgtacttgggctccaggtgtttttgttgttgtgtccgaaacttatccattgagaatccgttccaaaggtatggctattgctcaaggatccaactggttgtggggttttttgattgccttctttaccccattcatttctggtgccattgattttgcttatggttacgttttcatgggttgcactttatttgctttcttttttgtctactttttcgttccagagaccaaaggactttcattggaagatgttgacgaagtttatgagaacttgactttcggcagagcctacgcttactctcacaccatcaaggataagggtgctttgtaa

SEQ ID NO: 3372 - DNA, 408 bp, Artificial Sequence
  Optimized genes for Pichia pastoris
atgcaattctccattgttgctactttggcattggccggttctgctttggctgcttattccaacgttacctacacttacgagactactatcactgatgttgtcactgagttgaccacatactgtccagagccaacaactttcgttcacaagaacaagaccatcactgttactgctccaactactcttacaattaccgactgtccatgtactatttccaagactaccaagatcaccactgacgttcctccaaccacccactccactcctcacactacaaccactcatgttccatctacttcaactccagctcctactcactctgtttctaccatttctcacggtggtgctgccaaggctggtgtcgctggacttgctggtgttgccgctgcagctgcttacttcttgtaa

SEQ ID NO: 3373 - DNA, 792 bp, Artificial Sequence
  Optimized genes for Pichia pastoris
atgtctcaagctcctgcttccgctcaacaaggttcagcacctcaaggacaaagacaattcggtggtgctagaggaggtagaagaggtccaaagagaggtcctcgtcgtggtgaggaagagaagggatggactccagttaccaagttgggaagattggttaaagcaggtaagattacttccattgaggagatttacttgcactccttgcctgtcaaggagttccaaattattgaccacttgttgccagatttgaaggatgaggttatgaagatcaagccagtccaaaagcaaacttctgccggtcaacgtactagattcaaggctgttgttgtcatcggtgactccaacggtcacgttggtttgggtattaagactgccaaggaagttgctactgctatcagagctgccattatcatcgctaagctgtctatcattcctgttagaagaggttactggggttctaacttgggtgccccacactctttggcctccaagacctctggaaagtgtggttccgttttggtcagaatcattccagctccaagaggctctggtatcgttgcctctccagccgttaagaagatgatgcaattggctggtgttgaagatgtttacacttcatccggtggatctaccagaactttggagaacaccttgaaagctgctttcattgctattggtaacacttacggtttcttgaccccaactttgtgggatgactacgagttgtctgagtctcctttggacgtttatgctgacgaggcttctgcttcttacagaaagcgttactaa

SEQ ID NO: 3374 - DNA, 513 bp, Artificial Sequence
  Optimized genes for Pichia pastoris
atggttcaagttggtgacaagttcccaaccgacgttgctttgacttacattccatggactcctgaaaactctggtgtcttggcttgtgctatcccaattccttacgacttgtccaagaagttgccaggtagaactgtcgtcattgtttctgctccaggagctttcaccccaacttgtactgctaaccacattccagttttcattgagaagattgacgagttcaagaagaaaggtgttgacgatgttgttgttatcaccactgacactccatttgctaatgctgcttggggtaaggctcttggagccaaggatgagattatttttgccaacgatccattggccgctctgtctaaggagttgggttacttgaagtctgaagttccagcttctttcggtatcagaggtgccagatacgctgtcgttgtcaaggacggtgtggtctcttactttggtgttgaaacttcttctggagtcactgtttccggtgctgatgctgttttggaggctttgtaa

SEQ ID NO: 3375 - DNA, 972 bp, Artificial Sequence
  Optimized genes for Pichia pastoris
atgactttgaccatcaacccatctttgaagaacgtcttggaaaaccaaaagggtggtgctccagttgaaaatgacttgaaggctttgagaaagcacgctgacaagattgaagagcactactacaaggaggttatcaccaagccttctgatgttgctggtatgcaattcactatcactgctcacgatggagaccaaattgagtgcagattctactctaaggatgctgatccaaatcaagtcagaacttccaagttgccatgtattattcatttccatggtggaggttacattactggtgacgtttccagatattctcacttgacttctcaatatgtttctgctaccggtgttcctgttttgtctgttgattacagattggcaccagagtatccagctccaattccacaagaggacggtttctctgccttgcaatacttgtacgaacactgtgacaacctgatgattgacccaaacaagatcattttgatgggtgattcttctggtgccggtttggctctgtctgtcgctgcccttgctgctgagagaggtattcctattgctaagcaaatcttgatctacccaatgttggactccaacaatactgaagaaccagactctgaagatctgaaggaaaagaagccataccttacttggactcatagaatgaacaaattggcctttgattccctgttgtctgagaaagaggaatatgagccttccttgtttccattcaacgaccctaatgtcgactggtctaagttcccaaagacttacctggaaactgttaccgttgacattttgaacgatgatggtagacaattgcacagaaacttgactgagaacaacgttcaagttgagttccacgaatgggaaggtctgtgtcacggttttgagccattgttgtggaccgaggagaatgatttgctgcagaacattttggagaagagataccaagctattttggatgtctaa

SEQ ID NO: 3376 - DNA, 735 bp, Artificial Sequence
  Optimized genes for Pichia pastoris
atgcctcaaaagactacttccaagtacttgttgatgattccaattttcaaccgtttggctttcggtcaatgttgtagattcgtcaaccacttgtctggtttgaaattggatgaggaaaaaaaagctatcatttctgagagaactgccaaatactacgaagagtatgaagaagctgccagagtcttggaaaaggccaagtctgatgctgcagcttccggttcttactttgttgaggctgagccaaacttggtgttggttgtcagaatcaagggtatcaacaagattgctccaaagccaagaaaagttttgcaattgttgagacttcttcaaatcaatgctgctgttttcgttcgtatcaccaaggctactgctgaattgctgagactggttgaaccatacgttgcttacggatacccatctttggagactgtcagagaactgatctacaagagaggttacggtaagttgaacaaacaaagagttccattgactgacaacgatattattgagaaggttctgggacaatatggtattatctccattgaagatttgattcatgagatttacactgttggtcctaacttcaagcaagctaacaactttttgtatccattcagattgtccaacccagatggtggatggggtgttagaagaaagttcttccactacattcaaggtggtgccactggtaacagagaggagcacattaactccttggtcaagaagatgaactaa

SEQ ID NO: 3377 - DNA, 444 bp, Artificial Sequence
  Optimized genes for Pichia pastoris
atgtctttgtctactttcaatgccgaagaagctgagaacttggacgacattgagaagcaatttgctgtcaaggctgttactcaagctgaaacttactggaaccttttgactaagattccaggtaccaagttgaaacttactccatacgacgatgagatttttgaggctttgttgaaggatttcccagagtttgaaaacccagaatacgcttccaagatcaacgaagatgaaatgaaatctctttctggtaaggagagatggagaaagttcatgaagccattcgaggaaaagattgatgacttcaactttggtactttgttgagaactgattcttccaaagagtacgatcaagagggaactatctttgttgtcagattgcaattctacgccattgaaattgctagaaacaagtacggtttgaacgactggatttctcaaaaataa

SEQ ID NO: 3378 - DNA, 1488 bp, Artificial Sequence
  Optimized genes for Pichia pastoris
atggagcaacctcaagctatggaaaaggtcgagtctgttgatgttactgaggctaatgcagttgctgctggaaccaacaagctgaccaagagaatcgtcgctgccggtttaggaggtaaattgatgggtaccaagtctatggttgacgttaccgccgaccaattggccaaggactccatcaatgaattgctggccagagacaaggccctgaaggagaagtacgagaaacagaagcacatttctgaacaaccatggactaaagacaactggcatcaacacatcaactggttgaacatgattttagtttgtggtttgcctttgtttggagctattgctacttactacaagccaccaactaaggaaactgttattctgggagttgttttgtacattttgggaggattgtctatcaccgctggttatcacagattgtggtcccacagagcttactctgctagaactcctttgaaagttctgtttgctttgttcggtgctggtgctgttgagggttccattaagtggtggtctcactcccatcgtgttcatcatagatacactgacactcaccgtgacccatacgatgctagaaagggattttggtactcacacatgggatggatgttgaccaaaccaaaccctagatataaggctcgtgctgacatttccgacttggctgatgactggattgttagattccaacatagacactacttgttgatcatgactttcatggctttgattcttccaaccatcattgccaaatacttctgggacgacgcttggggtggattcatttacggtggtattttcaaggttttcgtcattcaacaagccaccttctgtgttaactctcttgctcactggatcggtgtccagccattcgacgatagaagaaccccaagagaccacttcttgactgccattgtcacctttggtgaaggttaccacaactttcatcacgagtttccatctgattacagaaacgctctgaaatggtaccaatacgaccctacaaagattgtgatctacctgtcttctaaggttggtctttcttacaacttgaagactttctctgacaatgccatcaagcaaggtttggtccaacagcagcaaaagaagttggattccatgagagcccacttgaattggggaactccattgcaagatttgccagtttgggataaatctgagttctttgaaaagtccaaggataagaagggtctggtcatcatctctggtatcgttcacaatgttgaaaacttcatcggagagcacccaggtggtgagaagttggttaaaggtgccttgggtaaggatgccactactgctttcaacggtggtgtttacgcccattctaatgctgctcataatcttctggctaccatgagagttgccgttatcagagatggtaacgctaacgccaacactttttctttgcagaacgaattcttggacaagaaagctgcagctgctgccgcttccaactaa

SEQ ID NO: 3379 - DNA, 1626 bp, Artificial Sequence
  Optimized genes for Pichia pastoris
atgtctgaaaagtactcccgtccagctcaacctcctccaacttacaaccaaccaggaggtggtcaatctcctttcaacgagccatactatccacagcagggtgttaactcttcagactaccaccaacaacagagaccagattatgatcctgaatctcaatttccaccagagaagattgttggatcaggtaagccagacaacgctgagacttttgacgattctttcaaagtcaagaacaagttgaatgactggccattcactattcttttcatcgctactcttgccggtttcgtggttgttgcaggtatcgttttgtctgcttgggcctccaactactcaacttctggatccggtatttacgactctggtgcctcttttaccttgaacactaacaccgtcgtcttatttgcctttgtgattgtcatctctttggttttggccgttctgatgttgtgctttgccagaatcgccccaaagcgtttcattcaagttggtattgtactgaacgtcgttcttggtctggcttcctccatctactaccttgctgtcggttattactctgctggtgtggtcttcttggtgtttacattgatctccgcttactgttactggtccatgagaggtagaattccattttccgcaactgtcttgaccattgtcattgatgttatgaagagaaacccatctactttgatgacctccctgatcggaattattgtttctggtgcatttgctgctttgttttctgccactgttgtcgccacctacatgaaatggactccatccgacgagaatggtaactgttccttcaatgaaggttccacctcttgttctagatccaaggttattggtatcctggtctttgtttttttcgctggatactacattactgaggttatcggtaatgtcatccacgttaccatttctggtgtctacggatcttggtactacttatccagatctgaccaaggtatgccaagattcccagcattgggtgctttcaagagagccatgacttggtctttcggttctatctgtttcggctctctgattgtggctttgttgcaattgctgaagaccatcattcagattttgaagaacgatgctatgcaaaacggtgaaggatggcaaactatcatcttgtgttgtgctgactgtattttgggattgattgaatgggctgttcgttacttcaaccactacgcctacagtttcgttgccctttacggtgagtcttacatgaagtctgctcgtgctacctgggatttgttcagagctaagggtttggatgccttggtcaatgattgtcttattggagctggtctttcattctttgcactgtttgtttcctacctgagtgctctgttctcttatttgtacttgagatacactgctccaggttacaattctgatggttcgttctacgctcctgttattgccttcacctttgtcattgctcttcaaatcgtcaacattgcttcttctgttatcagaagtggtactgccactttcttcgtctgtttggctagagacccagaagttttccaaatttcctatcctgatgagttctcccgtatttttgctgattaccctcaagtcatgaacaaagttgctgccagacagtga

SEQ ID NO: 3380 - DNA, 447 bp, Artificial Sequence
  Optimized genes for Pichia pastoris
atgcaattcaagtctttgattggtgccactttggctttgtctgttgtcaaggctactactgaattggagccaattttcaccaacgatgtcaacgttaccgttccaactgttcctccagagatcacttccactccagatgtttctgtcccaggtaacttgactgagactggtggattgaccaataccaccggtaccggtggttttaccaacaccactgctaccggaactggaggtttcactaacactaccgctacaggaactggtactgggactggcacaggaacaggcactggtaccggtactggtaccggaaccggaaccggtacgggtactggtactggaactggtacaactggaactggtaccgaaactggaaacggtgctcaagctgttttgggttcttccgtcttggccgctgctggtttgtttgttgctatgttgatctaa

SEQ ID NO: 3381 - DNA, 405 bp, Artificial Sequence
  Optimized genes for Pichia pastoris
atgtctaccgagaaccaagaaatcaaagaacaaattgatgctaccaaccaggagattgtcaacaacgctcaagaggccgccgagccagctacagaggctgttgctgagtcttccactcaagctgaagccactggtgaagttacttccgaacatgccaagtctttgaaggaaaagaccgaagagttcttggaccactccaagaaggaggttgagcacgcttttgaaactgctaaagagaaggctgatgagttggtcaagggtgctaaggccaaaaagactgaggctgccgaatccaatgctgagacttctgaagctgctactgaatctgctgacaaggttgaagaaaaaggtatcaagaagtacttcaccaagttcaagaacgttattaagaaagttgccaactaa

SEQ ID NO: 3382 - DNA, 1005 bp, Artificial Sequence
  Optimized genes for Pichia pastoris
atgttgtctactattgccaagagacaattttcttcctctgcctccactgcttacaaggttgccgttttgggtgccgctggtggaattggtcagccattgtctttgttgatgaagctgaaccataaggtcactgatcttgctttgtacgatatcagattggctccaggtgtggctgccgatgtctctcacattcctactaactctaccgtcactggttacactccagaagacaacggtttggagaagactttgactggagctgatttggtcatcattccagctggtgtcccaagaaagcctggtatgaccagagatgacttgttcaacaccaacgcttccattgtcagagacctggctaaggctgttggtgattactctccatccgctgctgtcgccattatttctaatcctgtcaactcaactgttccaattgttgctgaagttctgaagtctaagggtgtttacaacccaaagaagttgtttggtgtaaccaccttggacgttttgagagcttccagattcttgtctcaagttcaaggtaccaatccagcctctgaaccagtcaccgttgtcggaggtcactccggtgttaccattgttcctttgctgtcccaatccaagcacaaggacttgccaaaagacacttacgacgccttggttcacagaattcaattcggtggtgacgaggttgtgaaggccaaagatggtgctggttctgctactctttccatggctcaagctggagccagatttgcttcttctgtcttgaacggattggccggtgaaaacgatgttgttgagccatctttcgttgactctcctctgttcaaggatgaaggtattgagttcttctcctccaaagttactttgggaccagagggtgtcaagaccatccacggtcttggtgagttgagtgctgctgaggaagaaatgattaccactgccaaggaaactctggcaaagaacattgctaaaggtcaagagtttgttaagcaaaacccttaa

SEQ ID NO: 3383 - DNA, 1341 bp, Artificial Sequence
  Optimized genes for Pichia pastoris
atgtctgacaatgccaatgaaacctcttcttcgttgttggacaacgtctatttggattcttccgaccttttgatcgccagatatgacaagtggattttggctttggccttctttgagaacttttttgcccgttacgactccatcttgtcatcaactgccaaagattatggtaaattggtcaagcacttttctactgacactttgcctcaatttgaggtttctccttcctctaacattgctggtgctgtttacggttctgttaattctgaggctgacccaaataaaaatgtcaccggtgtcaattcattcattgagttgctgaaattcagatcttcagaagaccaaggtaagatcgctggactggaaacttcaatcagagagcaaattattccagagtttaaaaagtactctgctgacctgtccgctaagaagaaggatttgaccgctgatgcttctaagcagagaaaagagctgaagaagctgggattgcacttgagttcatctatttcaaagttgcaacactccactcaagtttttgaatctgcctctggaactggtaagatggattacaagaatgatccatacatgttgaagagagccgtttcgctgcacggtactgaacttattgccaaggaacacaaccacatggacttcttgaagcgtgaggagctttccttgatgactcttgagaagagaaccttggagttcatccaattgatttttgctgatgtttcaaacagaatcactgctgccgattccgttttctcaagatcctttgactcattgtccaagacattgtcctccattgacttggaatatgaatggaagcaattctccgaagttaacaaacaacgtttggttactgttgaaggtaacgacgatatctctggtgccaacatctccgccgacaacaagaaaagaggtttgtctgatctgtctttccctaacgatcatcatccagctactgagccaattctggagggtatccttcaaagaaaggagggaaaggtcaacaagaagtatgtttccgagtactacgttatcaccaagaccagatacctgtacgaattcgagtccaacgctccaaagaactctacacaaccaaacaccgttttgtacttgccagaatgtactttgaaatctttgaacggtcctgataactccaagttcaagattgaaatttctggcaaggacgctacccaagctttctctgtcatcaagtctaccctgattcttaagacttctacttacgatgaaatgagaacttggttcaacgttctttctgaagtctccggtctgatgcaaactcaggaggaatccagattggactctccaaactaa

SEQ ID NO: 3384 - DNA, 1515 bp, Artificial Sequence
  Optimized genes for Pichia pastoris
atgactgacactaaggctgttgaattcgtcggtcacactgccattgtcgttttcggtgcttccggtgacttggccaagaagaagactttcccagcattgtttggtttgtacagagagggatacctgtcaaacaaagtcaagatcattggttacgccagatctaagttggacgataaggagttcaaggacagaatcgttggatatttcaaaacaaagaacaagggagacgaagacaaggtccaagagtttttgaaactgtgttcttacatctctgccccttacgacaaaccagatggttatgagaaattgaatgaaactatcaacgaatttgaaaaagagaacaacgtcgagcaatcccacagattgttctacttggctttgccaccatctgtttttattccagttgctaccgaagttaaaaagtacgttcatccaggatccaagggtattgctagaattattgttgagaagccattcggtcatgaccttcaatctgctgaggaacttttgaacgccctgaagccaatttggaaagaagaggagttattcagaattgatcattatttgggtaaggaaatggttaagaatttgcttgcttttagattcggaaatgctttcattaacgcttcttgggataacagacacatttcttgtattcaaatttccttcaaggagccatttggaactgaaggtagaggtggttactttgactctatcggtatcatcagagacgtcattcagaaccacctgttgcaagttcttactttgttgaccatggagagaccagtttccaacgacccagaagctgtcagagatgaaaaggttcgtattttgaagtccatttctgaattggatttgaacgatgttttggttggtcaatatggtaagtctgaggacggtaagaaacctgcttacgtcgatgatgagactgtcaagcctggttccaagtgtgttacctttgctgctattggactgcacatcaatacagaaagatgggaaggtgttcctattatcttgagagctggtaaagctcttaatgaaggaaaggtggagattagagttcaatacaaacagtctactggtttcctgaatgacattcaaagaaacgagcttgttatccgtgttcagccaaatgaggctatgtacatgaagctgaactctaaagttccaggtgtctctcaaaagaccactgttactgagctggacttgacttacaaggatagatacgaaaacttttacattcctgaagcctacgagtctttgattcgtgatgccatgaaaggtgatcactctaacttcgttagagatgacgagttgatccaatcatggaagattttcactccattgctgtaccacttggagggtcctgatgctccagctcctgagatctacccatacggttctcgtggtccagcctctctgaccaagttcttgcaggaccacgactacttctttgagtccagagacaactaccaatggccagtcaccagacctgacgttttgcacaagatgtaa

SEQ ID NO: 3385 - DNA, 1083 bp, Artificial Sequence
  Optimized genes for Pichia pastoris
atgtctgtcatgaaggctctggtttacggtggtaagaatgtttttgcttggaagaactttccaaagccaactattttgcatccaaccgatgtcattgtgaagactgtcgccactactatctgtggaactgatctgcacatcttgaagggtgacgttccagaggtcaagcctgaaactgttctgggtcatgaagctattggtgttgttgagtctattggagacaacgtcaaaaacttctccatcggtgacaaagttcttgtttcctgtatcacttcatgtggttcttgttactactgtaagagaaacttgcaatctcactgtaaaactggtggatggaaacttggtcacgacttgaacggtactcaagctgaatttgtcagaattccttatggtgatttttccttgcacagaattccacatgaggctgatgagaaggctgttttgatgttgtctgatattcttcctactgcttacgaagttggtgtcttggctggtaacgttcaaaagggagattctgttgctattgttggtgccggtccagtcggattggccgctttgttgactgtgaaagctttcgagccttccgagatcatcatgattgacaccaacgacgagagattgtctgcctctctgaagttgggtgctactaaggcagtcaacccaacaaaggtctcttccgttaaggatgctgtctacgacattgtcaatgccaccgttagagtcaaggagaacgatttggagccaggtgttgatgttgccattgaatgtgttggagtcccagacactttcgcaacttgtgaggagattattgctccaggaggtagaatcgccaatgtcggtgtccacggtaccaaggttgacttgcagcttcaagatttgtggattaagaacattgccatcaccaccggtttggtcgctacttactctaccaaggacctgttgaaaagagtttctgacaagtctttggacccaactccattggttacccacgagttcaagttctctgagtttgaaaaggcctacgagacttctcaaaacgctgctaccactaaagcaatcaagattttcttgtctgctgactaa

SEQ ID NO: 3386 - DNA, 2475 bp, Artificial Sequence
  Optimized genes for Pichia pastoris
atgctgaaagccagaactgtcaagcctaaccaacttagattgaacgccttgcgtgccaaagttccaagaattctattggcttcttctttgtccactttgtctcttcgtacttcctccaacactcttgccgtcagaccagtccaaccaaagatcccatttgctagacacaatgtgaaccacttgagattgaggactccaatgtctatcagatttgcctcttccggtggtcctcaaatcaacatgaacggtcagcaagaagaagagcttccagcccttcaaaagtacggtgtcaacttgacccaattagcaaaggacggtaagttggaccctgttattggaagagacgaggaaattagaagaactattcaaattctttctcgtagaaccaaaaacaaccctgctttgatcggaaacgctggtaccggaaagacagctatcatggaaggtctggctcaacgtatcatcaagggtgaagtcccagaatccatgaaagacaaagaggttgttgctcttgatttgggatctctgatctctggagctaagttcagaggtgaatttgaagaacgtctgaaggcagtcttgaaggagttggatgaggctcatggtaacatcattctgttcatcgatgaattacacattttgttaggtttgggtaaggctgagggatccattgatgccagtaacttattgaagccagcattggcccgtggtcaattgcaatgttgtggtgctactacaattgaggagtacagaaagtacattgagaaggatgctgccttggcaagaagattccagtctgttttggttaacgagccttctgtgcaagacgccatctccatcttgagaggacttaaggagaaatacgaaatccaccacggtgttagaatcacagattctgccctggtcactgctgctgtttactctaacagatacatcactgatagattcttgccagacaaggctattgacttggtcgatgaggcttgttccgctctgagactgcaacatgagtcaaagccagatgttattcaacaactggacagacaaattatgaccatccagatcgagctggagtctctgcgtaaggaaactgatccaatttcagttgagagaagagataagctggatgagcaactaaagttaaagaaagaagagcttgagagactaactcaagtttgggaagatgaaaagaactccttggagaagatcaagactgccaaggaagaacttgaacaatccaaattggaactggaaagagcccagagagagggtgattttggaaaagcttcaatgcttcgttactcaaaaattccagagctagaacagaaggtctctgctaccgcccaaagagtgaaagaaggagaatctgaaaccactaccaatttgttgcacgagtccgttacttctgacgatatcgcttgggttgtctccaagatgactggtgtgccagttcaatctctgatgaagggagagaaggacaagcttttgtacatggaggaatcaatcaagtccagagttatcggtcaggacgaagccattcactccgttgccgatgctgtcagattacaaagagctggattgactaacgaaaagagacctattgcttccttcatgttccttggtccaactggaaccggtaaaacagaattgactaagtctttagccgagtttttgttcaatgatgaaaatgctgttgtgcgtttcgacatgtccgagttccaagagcgtcactctttgagtaggctgattggtgccccaccatcttacgttggtttcgaggagggtggtgagttaaccgaggccgttcgtagaaaaccatacgctgtcgttctgtttgacgagttcgaaaaggcccacagagacatttctaagttgatgttgcaaatattggacgaaggtaatcttactgactctcaaggtcacaagattgacttcaagaacaccattatcatcatgacatcaaaccttggacaagatctgttgcttgctgacactgagttggagaacgttggaggtaaggtttctgagaagaccaagaatgaggtcatccaagtcatgaagcagaactaccctcctgaattcattaaccgtttggatgatgtcctggttttcaacaggctttcaagagaaagtctgagaaagattgttgatattcgtctttccgaagttcaggatcgtttagtcgaccgtcgtattgaattgaaactgaccgatgcagccaaggaatggttgactgaaaaaggttacgacccattgtatggtgctcgtccattaaacagagtcattaagaagcaattgctgaacccactatcaattagattgattcagggtgagatcaccaacaattctaccgttaaggttgaccttgtggatggagacttgcagattaccagtgagaaaaatgaagctgaagctgagactgttaggaaggaggatggtgacgagccagctgaatacgagattattaaagattag

SEQ ID NO: 3387 - DNA, 360 bp, Artificial Sequence
  Optimized genes for Pichia pastoris
atgccaaaaaagagagcctccaacggtagaaacaagaagggaagaggtcacgtcaagtttgttcgttgtttgaactgtgctagatgtgttcctaaggacaaggccatcaagcgtgtcactattcgtaacatggttgaggccgctgctgttagagacttgtctgaagcttctgtttacgaggagtacgctcttccaaagttgtacaacaaattgcactactgtgtctcttgtgccattcacaccagaattgttagagtcagatctcgttctgacagaagaatcagagctccacctcaaagacagagattctctaacgatcgtagagttaacccagctgaggctgccaagaaggctttgtaa

SEQ ID NO: 3388 - DNA, 366 bp, Artificial Sequence
  Optimized genes for Pichia pastoris
atgttcagaactgctgcttcttccattggtagaagaggtttcactactgtcaagggagatccagccaaggctcaagctttcaagaagcacttggacgatgtctaccaccactccaagggtaccactgccttgtggaagaagatttcttacttcgttgctcttccagctattgctttgaccgctgtcaacacttactttgttgaggctgagcacgctgaacacagagctcacaatagacatttgtctgatgaggaatggccaaaggcctacccataccaaaacgtcagaagagttgacttcttttggggtgatggtgacaagactttgttctggaacccagatgttaacagacacgttaaggagtaa

SEQ ID NO: 3389 - DNA, 597 bp, Artificial Sequence
  Optimized genes for Pichia pastoris
atgggtttgttggatttggaacaacaattggccttctacagagcctaccacttcaacaaggttaacgttgccattcatttggtcttcgtcccaactattttgttctctactgttggattcttgtctgctattccattgaaccaaattactccatttgacctttctggtgttccattcttcggtaaattgtacaacttgggtgctttccttattgcttctttctccatttactacattctgttggacagattgggattagttttgactcctttgctgttattgatttcttactctatttccactttgtatgacttttacgacaagtctgaggttgtcaagggatctttggttctgtttggtattggatgggctgttcaattcgttggtcatgctttgtttgagagaagagctcctgctcttttcgacaacctggtccaagctttagtcttggctccatactttgttgcttttgaagttgtttttgctctgggtttcagaaaggacttgcaaaagaagatgaacaaccacgctggtaagttgatgttggagtttagaaccagagagaagggtcacccagtcgttgaaaagactgattag

SEQ ID NO: 3390 - DNA, 636 bp, Artificial Sequence
  Optimized genes for Pichia pastoris
atgtctttctctgatttttctaaggttgagactatttctgagttgaacgacttgttggctgacaagtcttacattgatggtacttctccaactcaaattgacgttgttgtctacaaggctttccaaaagcaagctccaaactttgctagatggttcaaccacattgcctccttcactgacgagtttgacactttgccagaaggtaacgctcctgctgcagctgttgctgccgagcttgctgaagaggaggaagatgttgacttcttcggttctgacgatgaagaagaggatgaggctgctgagaagctgaaacaagagagattggccgcttacgctgccaagaaggcagcaaagggaccaggtccagctgctaagtccttggttaccttggatgtcaagccatgggacgacgaaaccaacatgcaagatctgttggacaacgttaaggccatcaaatgggatggactggtttggggtgctcacactttcgttccagttggttttggtatcaagaaacttcaaatcaacttggtcgttgaagacgagaaagtttctttggctgatttgcaacaattgattgaggaagatgaggaccacgttcaatctactgatattgctgctatgtccaagttgtaa

SEQ ID NO: 3391 - DNA, 399 bp, Artificial Sequence
  Optimized genes for Pichia pastoris
atggctccaaaggctgagaagaaaccagcttctaaagctcctgctgaaaagaagccaactgctggtaagaagacttcatcttcctctgagccaaaaaagagatccaaggtcagaaaggagtcttatgcttcatacatttacaaggttttgaagcaaactcatccagacactggtatttctcaaaaggccatgtctatcatgaactctttcgtcaacgatatttttgagagaattgcttccgaggcttccaagttggcctcttacaacaagaagtctactatctctgctagagagattcaaaccgccgttagattgattttgccaggtgagttgtctaagcacgctgtttctgaaggtaccagagctgtcaccaagtacacttcttctacccaagcttaa

SEQ ID NO: 3392 - DNA, 393 bp, Artificial Sequence
  Optimized genes for Pichia pastoris
atgtctggaggtaagggtaaagcttcctctgctgagaaggcttctacttctagatcttccaaggctggtttgactttcccagttggtagagttcacagattgttgagaagaggtaactacgcccaaagaattggttctggtgctccagtctacctgactgctgttttggagtacttggctgctgaaattttggaacttgctggaaacgctgccagagacaacaagaagtccagaatcattccaagacacttgcaattggccatcagaaacgatgaagaattgaacaaacttttgggtcacgttactattgctcaaggtggtgttcttccaaacattcaatctgagctgttgccaaagaagtctgccaaggccaaagcctctcaagagttgtaa

SEQ ID NO: 3393 - DNA, 1002 bp, Artificial Sequence
  Optimized genes for Pichia pastoris
atggctatcactgtcggtatcaatggatttggtagaattggaagattggttcttcgtgttgctttgtccagagctgatatcaaggttgttgccattaacgatccattcattgctccagagtacgctgcttacatgttcaagtatgactctactcacaaagcctacaagggtgaagtttctgcctctggtaacaagatcaacattgatggaaacgagatcaccgtgttccaagagagagacccagttaacatcccatggggtaaggctggtgtcgactacgtcattgaatcaactggagttttcactactttggaaggtgcccagaagcacattgacgccggagctaagaaggtcgttattaccgctccttccaaggatgcaccaatgtttgttgtgggtgttaatgaagagaagtacacctctgatctgaacattgtttccaacgcttcttgtactaccaactgtttggccccattggcaaaagttgtcaatgacactttcggtattgagtctggattgatgaccaccgttcactccatgactgccactcaaaagactgttgatggtccttctcacaaggactggagaggtggtagaactgcttccggtaatatcattccatcctccactggtgctgccaaggccgttggtaaagtaattcctgaattgaacggtaagctgaccggtttggctttcagagttccaactgtggatgtttcagttgttgacttgaccgtcaacttgaagaaggagaccacttacgaggagattaagtctgttatcaaagcagcatctgagggaaaattgaaaggtgttttgggttacactgaagatgctgttgtctcttctgacttcttgggagatgagcgttcttccatttttgatgcctctgctggaattcaattgactccatctttcgtcaagttgatttcttggtacgacaacgaatacggatactctaccagagtcgtcgatttgttgcaacacgttgccaaagcttaa

SEQ ID NO: 3394 - DNA, 1245 bp, Artificial Sequence
  Optimized genes for Pichia pastoris
atgaacttgtacttgatcactcttctgtttgcttccttgtgttctgccattaccttgccaaagcgtgacatcatctgggattactcttccgagaagattatgggtgtcaatcttggtggatggttggttttggagccatacattactccttcattgtttgaggcatttggtgacgatgttccagttgatgaataccgttacactgagagactgggtaaatctttggctttggatcgtttgcaacaacattggtcaactttctatgacgaaaaggacttccaggatattgctgcttacggattgaacttcgttagaattccaattggatactgggctttccaattacttgatgatgacccttacgttcaaggtcaagaggagtacttagacaaggctctggaatggtccagaaagcacggtttgaaggtttggattgatttgcacggtgctcctggttctcaaaacggttttgacaattctggaaagagagactcttgggactttcaaaatggaaacaatgtccaagttactttggacgtcctgaagtatatttctaagaagtacggtactactgactactacgacgttgtcattggtattcaattgttgaatgaacctttgggtcctattttggacatggataacctgcgtcaattctacgctgacggttatgatctggtcagagatgtcggtaacaactttgttgttattcatgacgctttttaccaagctccagagtattggggagatgatttcacttccgctgaaggttactggaacgtcgttctggatcatcaccactaccaggttttcgatgctgatgagcttcaaagatctattgacgagcacattgaggccgcttgtgactggggtagagacgccaacaaggaataccactggaatctgtgtggtgagtggtctgctgccttgaccgactgtactccatggttaaatggtgttggtaagggtaccagatacgagggacaactggacaactctccttggatcggttcctgcgagaactcccaagatccatccaagttgtcttctgaaagaatctgtgagtacagaagatatgttgaggctcaattggatgccttcttgcatggtaagtctgcaggtttcattttctggtgtttcaagactgaagcttctttggaatgggattttaagagattggtcaacgctggtatcatgcctcaaccattggacgacagacaatacccaaaccaatgtggattttag

SEQ ID NO: 3395 - DNA, 1053 bp, Artificial Sequence
  Optimized genes for Pichia pastoris
atgtctccaactatcccaaccactcagaaggctgtcatttttgaaactaacggtggaccattggaatacaaggacattccagttccaaagccaaagtccaacgaattgttgatcaatgttaagtactctggtgtctgtcacactgatcttcatgcttggaagggagactggccattggacaacaagctgcctttggttggaggtcacgaaggtgctggagttgtggttgcttacggtgagaacgtcactggatgggaaattggtgactacgccggtatcaaatggttgaatggatcttgtttgaactgtgagtactgtattcaaggtgccgagtcttcctgtgccaaggccgatttgtccggtttcactcatgacggttccttccaacaatatgccactgctgatgctactcaagctgctagaattcctaaggaagctgaccttgctgaggtcgccccaattttgtgtgctggtattactgtctacaaagccctgaagaccgctgatctgagaatcggtcaatgggttgccatctctggagctggtggtggtcttggttctttggctgtccaatacgctaaggctttgggcttgagagtcttgggaattgatggtggtgcagacaagggtgaatttgtcaagtcattaggtgctgaagtttttgttgattttaccaagactaaggatgtcgtcgcagaggttcaaaagttgaccaacggaggtcctcacggtgttattaacgtttctgtctccccacacgctatcaaccaatctgttcagtatgtcagaactttgggtaaggttgttctggtcggtttgccatctggcgctgttgtcaactctgatgttttctggcatgttttgaagtctattgagattaaaggttcttacgttggtaacagagaagactctgctgaggctattgacttgttcaccagaggtttggtcaaagctccaatcaagatcattggattgtctgagttggccaaagtttacgagcaaatggaagcaggtgccattattggtagatacgtcgttgacacttccaaataa

SEQ ID NO: 3396 - DNA, 435 bp, Artificial Sequence
  Optimized genes for Pichia pastoris
atggcttccaagactgagaacgtcactttgggtcctcaagttagagatggttctcaagtcttcggtgttgcccgtatttttgcttctttcaacgacactttcgttcacgttaccgatttgtccggtaaggagactattgctagagtcaccggaggtatgaaggtcaaggctgacagagacgagtcttctccatacgccgctatgttggctgctcaagatgttgctgccaagtgtaaggaagttggtatcactgctgttcatgttaagctgagagctactggtggaacttccaccaagaccccaggaccaggtggtcaatctgctttgagagccttggccagatctggtttgagaatcggaagaattgaagacgttactccagttccatctgactctaccagaagaaagggtggtagaagaggtcgtagacgttaa

SEQ ID NO: 3397 - DNA, 156 bp, Artificial Sequence
  Optimized genes for Pichia pastoris
atgccatctttgaagactttcaagaccaagcagaagctgggtaaggctcaaaagcaaaacagaccattgcctcaatgggttagattgagaaccaacaacaagaaccgttacaacgctaagagaagacactggaagagaactaagttgggtatctaa

SEQ ID NO: 3398 - DNA, 387 bp, Artificial Sequence
  Optimized genes for Pichia pastoris
atgcaaattttcgtcaagaccttgactggaaagactatcactttggaagttgagtcttccgacactattgacaacgttaaatctaagattcaggacaaggagggtattccacctgaccaacaaagattgatttttgctggtaagcaattggaggatggtagaactctttctgactacaacattcaaaaggaatctaccttgcacttggttcttcgtttgagaggtggtatcattgagccatctttgaaggttttggcttccaagtacaattgtgataagtctgtttgcagaaaatgttacgccagacttccaccaagagctaccaactgtcgtaagagaaagtgtggtcactccaaccaactgagaccaaagaagaagttgaaataa

SEQ ID NO: 3399 - DNA, 1647 bp, Artificial Sequence
  Optimized genes for Pichia pastoris
atgtccaaggagtctggtaaagttcttcaagtcaactactctgactctgaaacatccaacggtgaggaccaatacgttcacaaaatcaaaccagttgaggatgaagatgacacttccatgatgatgtctttcgacaaccacaagccaaccattactatcattatccttactgtgatggcctctttctctggtttcatgttcggttttgacaccggttacatctcttctgctttagtttccatcggtactgacttggacaataaggtcttgacttacggtgaaaaggaattgatcacctctgccacttcacttggtgccttgctgtctgcaatttctgctggtcttcttgctgacattattggaagaaagcctgttatcatgggatcaaacttgttgtttgttgtcggctctgtgattcaatgtgccgctaacactgtctggaccatgattggaggtcgttttgtcatgggttttggtgtgggaattggatccttgatcgctcctctgtacattggagaaatggctccatccagattcagaggtagattggtgatcatcaacgtcattgctataactggtggtcaactggttgcctacgccattggtgctggtctgacccacgtccacaacggatggagaattttggtcggtttatctatcattcctccagtcatccagttgttcgttttcttctttttgccagagaccccaagatttcttattatgaccaacaagctggagaaggctgccaaggtaattggtaagactcataatgaatctgatgaggagttgattcagaccaagatcctggaaattcaatcagccaacgctattattccaggttctaacccattccaaaagacctggaacgccattaaagagattcacagagtcccatctaacttcagagctctggtcatcggttgtggtttgcaaggtatccaacagttcactggattcaactctttgatgtacttctcagctactgtttttgaaaccatcggattcaagaactccactgctgtctctctgatcgtcgccggaactaactttattttcacctccattgccttcttcgtcattgacagagttggtagaagacgtattcttttgattggtgtcactggtatgattttgagtttggttatgtgtgctgttgctttccacttcttggatatccacttttctggtcacaatgctattgtcgagactaatggtatctccggtaccggagttgctatcatcgttggaatgatcttgtacgtcgcttcttacgctttgggtattggtaacgttccatggcaacaatccgagcttttcccacaatctgttcgtggtgttggttccgcttactgtactgccgttaactggtctggatctcttgttattgcatctaccttcctgactatgttggagaacatcactccaactggcactttctccttctttgctggattgtcttttgtttctttaatttttgtgtttttctgttacccagaactgagtggtttgaagttggaggaaactcaagagatcttgaccggtggtttcaatatcaaggcctcattgaaattggctaagcaaagaagaaacaaacaattggaagacccagacaagattgttcataaggttgttgatcaagtttag

SEQ ID NO: 3400 - DNA, 531 bp, Artificial Sequence
  Optimized genes for Pichia pastoris
atgttgagaagatacttttcttccaactctgccagaatggttcaagttggtcaatctttgcctaagaccactttgttcgtcaaggacccttctgatcaatttgagtctggttctattgagccaaactccgtcattgttactgttcctgctgctttctctccaacttgttctgacactcacgtcccaggttacttgaccagattgaaagacttgaagtccaagaacatcaaccacttgtacgttgtttctgtcaacgatccattcgttaccaacgcttggaagaagacattgttgaagtctttctccattgacaagactgaagttccagtcactttcttggctgacccaaagggtgactttatccacggtttggatttggacttcgactccgctgccgttttcggtaacaacagatctaagagatccgcattgatcattggttccgatggtaaggttgccaaggattttgttgaaccagacaacactggtctgaaggtctctgctgttgactctgttttgaaggctttgtaa

SEQ ID NO: 3401 - DNA, 504 bp, Artificial Sequence
  Optimized genes for Pichia pastoris
atgatcatctacaaggacatcatttctggtgatgagttgctgtctgatgcttacgacgtcaaggaggttggtggagttgtctacgaggctgactgtcagatggttactgttggatctggagatgttgacattggtgctaacccatctgctgaagaaggtggtgaagatttggaggatggagctcaaactgtcaacaacgttgtttactccttcagattggctgagactcaatttgacaagaagtctttcatggtgtacatcaagggttacatgaagagaatcagagctcacttgactgagaacgctccagaccaagttgaagctttcgagaaaggtgcctctgcctacgccaagaagattttgtcttcttttggtgactgggatttctacactggtgagtccatggacccagatggtatgattgttttgttgaactacagagaagacggtgtcactccatacgtttctatctggaagcacggtgttaaggaagagaagatctaa

SEQ ID NO: 3402 - DNA, 837 bp, Artificial Sequence
  Optimized genes for Pichia pastoris
atgttcaccagatctgttagaaactctttcgtcagagccggtccaattagattgggtcctgttgtctctaagagactgtactcccaggctcaaaacggtggtatcaaccacaagagaattttgatcggtctgggtttgttggctattggtactacattgtacggaactaccaacccaaccaagactcctattgcctttgttgagccagctactgagagagctttcaaggacggtgatgtttctgtcattttcgttcttggtggaccaggtgctggaaaaggtacccaatgtgctaagttggtctccaactacggttttgtccacttgtctgctggtgacttgttgagagcagagcaaaagagagagggttccaagtatggtgaaatgatttcccaatacatcagagatggactgattgttcctcaagaagttaccattgctttgttggaacaagctatgaaggaaaactttgagaagggaaagactagattcttgattgatggtttcccaagaaagatggatcaagccaagacctttgaagaaaaggttgctaagtctaaagttactttgttctttgactgtccagagtcagttctgttggagcgtttgctgaaaagaggtcaaacttctggaagagaagatgacaatgctgagtctatcaagaagcgtttcaaaactttcgttgaaacttccatgccagttgttgactacttcggtaagcaaggtagagtcctgaaggtctcttgtgatcatccagtcgaccaagtctactctcaagttgtttccgttttgaaggagaagggtatttttgctgacaacgagaccgagaacaaataa

SEQ ID NO: 3403 - DNA, 468 bp, Artificial Sequence
  Optimized genes for Pichia pastoris
atggctactgagttgattgttcaatctgagaaggccttccaaaagcaaccacacattttcactaacccaaaagccaaggctaacaaaagaaccaagagatggcataaggatgttggattgggtttcaagactccaaagtctgctattgaaggttcttacattgacaagaaatgtccattcaccggtactgtctccattagaggtaagattttgactggtaccgttatttctactaagatgcacagaactattatcatcagaagagactacttgcactacgttcctaagtacaacagatacgaaaagagacacaagaacgttgctgctcacgtttctccagctttcagagtcaacgagggtgacttggtcactgttggtcaatgtagaccattgtccaagaccgtcagattcaacgtcttgaaggttactcctgctgtcggtggtaacaagaagttctctaagttttag

SEQ ID NO: 3404 - DNA, 1026 bp, Artificial Sequence
  Optimized genes for Pichia pastoris
atgtctcactacacctacttgggtgactctggattgcaaatttctcgtgtcatcgtcggttgtatgtccttcggttccaagaaatggaacgaatgggtcattgaagatgaagacaagatttttgagattctgaaacactgttacgacaaaggtatcagaactttcgacactgctgattcttactctaacggtgagtctgagagactgttgggtaagttcttgaaggtttacaacatcccaagagaatccgttgttattttctccaaagttttcttcccattgggagacaacgagaagggtttcaactacactactagagctcaattccctcaacatgaattgatcaatagacaaggtctgtctagaaagcatattattgatggtgtcagatcttctgttgaaagattaggtacttacattgaccttcttcaaatccacagattggatccaaacgttcctccaaaggagatcatgagagccttgaacaacttggttgagtccaaccaagttagatacctgggtgcttctaccatgaagacttggcaatttgttaatttgcagaacattgctgagcaaaacggatggcataaattcatttcaatgcaaaattactacaatcttttgtacagagaggaagagcgtgagatgaacgactactgtaagcacaatggtgttggtttgattccatggtctcctaacgctagaggtattttgaccagacctttgaaaactttgactacccgtgctaccactgatgctgctatcaagatggttggacttgactccttgtctccagaatctgaagaaatcatcaacagagtcgaaaagttggcttccaagaagaacgtctccatggctgttatctccaccgcttgggttttgcacaagggatgtaacccaatcattggtttttctaagccatccagagttgatgaggctttggaagctttggacttggagttgttgccagaggacattcagttccttgaggagccataccgtgccaataacgatttgtttggttag

SEQ ID NO: 3405 - DNA, 5637 bp, Artificial Sequence
  Optimized genes for Pichia pastoris
atgtcatacaatgatgacaagtattacaaccaaggatacccttccgagggttaccacccaagtgaagaagctcttcaatcccagggttactacgaccagggacaaggtcaacaacctcatggtttaaaccaaggtggtctgcctcctcacgagtattatcagtcttacgaccaacagttcgatggctatcatcaagaatacacttcagacccaaacctggttggtcaccaaggatactacgagcaacctccacgtactgctcaagatcctgaggccttctctgatttctcctatggtccaggtaacggagctggtaccccgtatgacggttacggtgcccagtacacaccatcccaaatttcttatggtgacccaagaagttccaacacctccacccctgtttacggagccggaccttacgatcaatctggaatggtggcacttccaactgatccatatccagcatggacagccgataatcaagcaccagtctcaatcgaacagattgaagatgtcttcattgaccttactaacaaatttggattccaaagagattcaatgagaaacatgtttgattacttcatggttcttttggactcccgttcctctcgtatgtccccagctcaagctttactgtccttgcacgctgattatattggaggcgatcacgccaactataaaaaatggtactttgccgctcagcttgatctagacgacgaggtcggtttcagaaatatgaatctaggtaaattgtctaggaaagccagaaaggccaagaagaaatccaagaaggcacgtaaggttgtggaagagcatgctgatgatactgagaggactttgactgaactggaaggtgacagtagtttggaagccgccgactaccgttggaacgctagaatgaacgcatatgttcctttagaccgtgtcagacatatcgccctgtatctgctgttatggggtgaggctaatcaagtgagattcactcctgaatgtttgtgttttatctacaagtgtgccagtgactatctagagtctgacgcctgtcagcagagagttgagccagtgccagaaggagactacttgaaccgtatcattactcctctttatcgtttcattaggtcacaagtctacgaagttgacaacggtagatatgtcaagcgtgagaaggaccacaacaaggttgttggttatgatgacgtcaaccaattgttctggtacccagagggaattgctaagatcgtatttgaggacggttccagattggtagacgttccctccgaagagcgttacatccgtcttggtgaggttttgtgggaaaacgtcttcttcaagacctacaaggaaatcagatcatggctgcatttcattaccaacttcaacagaatttggattatccacgtttctcttttctggatgtacgccgcgtataactcccctacactctacaccaagcattacattcaaacccaaaacaatcagccacttgcttcatcaaggtgggcagctgccgctttgggaggaaccgttgcttgtgctatccagatcgctgctaccatttgtgaatggttatttgttccaagaaagtgggctggtgcacaacacctgtcaagaagactgattttcttgactttgatcttagcttgtaatcttgccccagttgttttcgtcttcgcctgggctggattagagacttatagtcaagctgcttatattgtcagtatcgttgtcttctttgttgccgtcgccacaattgttttcttcagtgtcatgccattgggtggtctttttacatcttacatgaacaagagatctagaaggtacgttgcttcccaaactttcaccgcttcttttgctcaactgaaaggtctggacatgtggatgagttatttattgtgggtcgtcgtttttaccgccaaaactttagaatcatatttcttccttattctatctctgagagaccctattcgtaacttgtccatcatgaccatgaacagatgtgtgggagagagatggtttggtgacactctatgtagagagcaagcccgtattgtattgggcttgatgtacgtcaccgacttgttcctgttctttttggacacttacatgtggtacatcctgtgtaactgtgtcttttctgttggtagatcattttacctgggtatctctattctgactccatggagaaacatattcaccagacttcccaagagaatttactcaaaagttctggccaccaccgatatggagatcaagtacaaaccaaaggtgctaatttcgcaggtttggaatgccattgtcatcagtatgtatagggaacaccttctggctatagaccatgtccagaagttgttataccatcaggtcccaagcgagattgagggtaagagaactttaagagcccctactttttttgtgtctcaagacgacaacaactttgacacagaatttttccctcgtgactctgaggctgaaagaagaatctccttctttgctcagtcattggcaactcccattccagagcctttgcctgtcgacaacatgcctaccttcaccgtgttcactccacattattctgagaaaattcttttatcgttgagagagatcatcagggaggatgatcagttttccagagtcactttgttggagtatttgaagcaacttcatccaattgaatgggactgtttcgttaaggataccaagattttggctgaggaaacttccggatttgacaatgataaccaggagaagaatggaaacaatttgaagtctcagatcgacgatcttcctttctactgtattggtttcaaatctgccgctccagaatatactttgagaactcgtatctgggcctccctaagatctcaaacactgtacagaaccgtctccggttttatgaactacgctagagctattaagctattgtatagagtcgagaatcctgaaattgttcaaatgttcggttcaaacgctgagaaccttgaaaaggagttggagagaatggctcgaagaaagttcaaattcgtagtcgctatgcaaaggctttctaagttcaagccagaggaattggaaaacgccgagtttctgttgcgtgcctatcctgatttgcaaatagcttacttggatgaagaaccacctttgaacgaaggtgaagagcccagattgtacagtgctttgatcgatggacattgcgagattatggaaaatggccgtcgtagacctaagtttagagttcagttaagtggaaatccaattctcggtgatggtaagtccgacaaccagaaccactccattatctttactagaggagaatacatccaattgattgatgctaaccaggataattatttggaggagtgtcttaagatccgttctgtgttggctgaattcgaggagcttaacattgatcatgttaacccttataccccaggactgaagtcagagttcgacggagtcaaacatcctgtggctattgtcggagctcgtgagtacattttttcagtcaattcaggagttttaggagatgttgctgccggcaaagagcagacctttggtactttattcgcaagaacattggcccaaatcggtggaaagctgcactacggccatccagatttcttgaataacatctatatgactactagaggtggtgtttccaaggctcaaaagggtttgcatttgaatgaagacatttatgctggtatgactgccatgtgtcgtggtggaagaatcaagcactgtgagtactaccaatgtggtaagggaagagatctgggatttggctcaattttgaactttaccactaagattggtgccggtatgggtgaacaaatgctatccagagaatattactaccttggaacacagttgccactggatcgttttctttcattctactatgcacaccctggtttccacattaacaacttgtttattcagctgtctttgcagatgttcatgttgaccttggttaatctgaattccttagcccatgaatctatcatctgccaatacaacaggaacattccaatcaccgatatcatgtacccagtaggttgttacaacttgatgcccactattgactggatcagaagatacactctttccatttttattgtgtttttcatttctttcatccctctggcagtccaagagctgatcgagagaggtatgtggaaggctgctcaaagattctgcagacacttcatttcattatctcctatgtttgaagtcttcgtggcccaaatttactcttcttcactggtcaacgatttgacagttggaggtgctagatacatttccactggtcgtggatttgccactgctagaatcccattctccgttttgtactccagatttgctgactcatccatctacatgggtgctaggtccatgctgttgttgctattcggaactgttgcccactggcaaccagccttgctttggttctgggcctctttgtctgctctgatgttctctccatttatcttcaacccacaccaatttgcttggcaagattacttcatcgactacagagacttcatcagatggctttcgagaggtaatacaagatggcacagaaactcttggattggctacgttagattatcacgatccaggatcactggctttaaacgtaaaaccatcaacgatgagtcagaaaaagcagccggagatgccgcacgtgctcatagatccaatattttagttgcagactttattccttcagccatctacaccgcaggatgtttcacagcttacactttcatgaatgcacagaatggtgtcgccaatgctactgtcgtgaattctgtccttagaattgttatcgtctctattgctcctatcgtggtggacttggccgttttgggattctgtgcaggccttgcatgttgtgctggaccaatgttaggtttgtgctgtaagaagactggtgctgttatggccggtgttgctcacggtattgctgtcgttattcatattattgcatttatcggactatgggttcttgagggcttcaatttcactaaaacattaatgggattggctgccatgatttatatccaacgtttaatcttcaagcttatgaccttaactatgcttaccagagaattcaagaacgaccactctaacacatccttttggactggaaaatggtacggttctggtttgggttggatggcttggacccagcctgccagagagttcgctgcaaaggtcattgagatgtctgaatttgcaggtgattttgtcttgggtcacatcttgctgttttgtcaattcccattactttgtgttccattgattgacagatggcattctatgatgttgttttggttgaaaccttctagacaaattagaccaccaatatactctttaaagcaggctcgtctgagaaaaagaatggtcagaaattacttaaccctttactttttggtctttgcaattttcgttgccattattgccggtcctgctgctgctgctggccaagttaacgttgaagaacttacagagcacttgcccgagtttgccgaaggtctcattcaaccaagaagacaggacaataatgacaccggtaacaacaacacttggggatggacttacactccatctacttcttcctggtctaccaaagcttaa

SEQ ID NO: 3406 - DNA, 1542 bp, Artificial Sequence
  Optimized genes for Pichia pastoris
atgattagatccactcttcttagacgttctattgttactccatgtcgttacaagtctactaaagtcaacttccacagacctgatggtccaggttctaaggacgctgccgaacaagctgatgccaccgctactatcttggctgactctctggatttccaaaagagaatccgtccttccgagtctgctccaaacaagcttacatggttggatgctttgaacgaaaagaagcgtcaactgtcagagggtaagacaatttcctcttttgcttaccaatccaccaagactactgcagttggtgagaagaccagatctgaatcattctcttacttgactttaccattcaaagatgatgtttggttacgtgactcatacatcaacgctgctggtagattgagagtcggtcaattgtttcaagatttggatgctcttgctggacgtattgcctaccgtcactgtgccccagctgagccagtcaatgtcactgcctctgtcgacagaatttacattgtcaagaaggttgacgatattgagaactacaactttgtccttactggtgttgttacctggactggaaggtcttccatggaaatctctgttaagggatacgctttccctggtgactacccatctgagatcaaggaaaccaacttgtctgatgacgctgttttcttgaaggccgactttaccttcgttgctagaaacccagagacccacaagtccttcccaattaaccacttgcttccaaccaatgagagagaatggcttgacttcagaagagctgaatcccacaatgctcagaagaagctgagagccaagttggagactctagataaggtcccaccaactcaacaagagtccaatttgatccacaacctttatattgcttctaaggctgtcgccaagttagatcctgagcaatcttccaagttgattttcatgaaggattctcaagtttcttcaactttgttcatgcaacctcaatacagaaacagacactcctacatgatcttcggtggttatttgttgagacaaacctttgaattggcatactgcgcagccggtgctttttcttgtgctcctcctagattcgtctctttggactctaccactttcaaggcaccagttcctgtgggtgccgttctgtttatgaacgccagagtttgttacactgagcacattaaggaggaaggtgaaggagactccattcctgttttggcctccttgctgaaggcttacgagttgccacctgccaaccaaatttctcacgattcaagtgagttcctttccagaccaggaactattattcaagtcaaagttgatactaagatcagaaatcttgattccgttgaggctattgaatctggatctttcatctactctttctttgttccaagagataccgaaggtgtcagagacaagccaggttactgttccgtcgttccacaaacttacgaagaaatgatgttgtatatcgagggaagaagaagagcatttgacactgctgagtacgccaaagcccttcatgaagctaagaaagcttaa

SEQ ID NO: 3407 - DNA, 450 bp, Artificial Sequence
  Optimized genes for Pichia pastoris
atgccaaccagattctctgccactagaaagcacagaggtaacgtttctgctggtaaaggtagagttggaaagcatagaaaacatccaggtggaagaggaaaggccggaggtcaacatcaccacagaaccaacatggacaagtaccacccaggatacttcggtaaggtcggtatgagacacttcagattgcaacaagccagatactggagaccagttatcaacatccaaaacttgtggtctttgattcctgaagagaagagagaagatgctttgaagaactcttctgcttcttccgctgtcgtcattgacactttggccaacggttacggtaaggttttgggtaagggttctcttccaaacattccaattattgtcaaggctagatttgtttccaaggaggctgagcaatctatcagagctgttggtggtgttgttgagttggttgcttaa

SEQ ID NO: 3408 - DNA, 1209 bp, Artificial Sequence
  Optimized genes for Pichia pastoris
atgtccaagcaaactccatctggaatgactttcatttccttggttgacgattccaacgactctcctgttactcaatctacctctgctgacaaggacgagaagcacactgctgtttctcaagaacagatcaacgctgctggaaagaagcagaaccaagttgatgatgaggaagaagaagagcagaaggaggaatataagcgttctttggaagagattgagatcaaggatgccgcttactacaagatgaccgacccagttttgctgtacgatattccagctcaagtcaactcttctgatgaatacatcaaatggtctccaaacattgtccaaaccagaatgttgttgaaccacttgcagattccttttgaagttcaatggttgacctaccctcaaattaaaccaactttgcaaaagttgggtgttaagccatgggattctgaccctgagtacactttgccagccatctcctacaagggtaccactgttatgggtagatctgaaattgaggagtttgttaaacagaattttgatcctttgtctactcctaacttcactgattactttttggacattgaagacagaaagttcaacagagctatttctaactactctgaccaaatcctgatgggtaagctttctttcccattgttggctttctctgagtctattgttgtcaaagatgagaacgatccagagtacttccaaagaaccaagaacgagagattcggtgtcgactgtcaagctcttgtgaaagacaaggaaaagattcatgaaatggttgaggcaatctgtaacgaacttccaggtttcatggaattgtacgactactccgaagctgagaatgctgatcttttgttcttgaaggttaacaagtacttgatgggattccacatcactagagccgatttgatcattgcttcttacgttttctggattaagaccgctgtcaaggctggtatggaggagcactcctttcacaattactggttcgatgcttggtacaacagaatctctaagctgttagactccccattcgacggttccaaagttgaacaagaggctttggatgacttgaataagagaattgaaggttctcaccaaaaccgtgtcagagagtccggtgagcaaattgacgaaaatgataagactgaaaacgtcaatgagttgactgagccagcatcttccactgtcgagcaaccacctgcttaa

SEQ ID NO: 3409 - DNA, 450 bp, Artificial Sequence
  Optimized genes for Pichia pastoris
atgtctgacaaattgtctgaggctcaaatttccgaattcaaggaggctttctctttgttcgaccaggaccaagatggtaagatcacttccaaggaattgggtattgttatgagatctcttggtcaaactccaactgagtctgaattgaacgacttgatcagagagattgactctaacactgatggatctatcgacttcccagagtttttgaccatgatggctagaaagatgagagattctgattcccaagctgaaatttttgaggccttcagagtctttgacaaggacggtgacggaaagattgataagggtgagttgaagcacgttttgacttctattggtgaaaagttgactgaagaggaagttgatgaaatgttgagagaagctgacaccaacaacgatggtgttatcgatatcaaggagttctccaacttgttggtcaacaaataa

SEQ ID NO: 3410 - DNA, 1518 bp, Artificial Sequence
  Optimized genes for Pichia pastoris
atgtctacttcttcaaagctgggatggttgtctaagttggatgtctcttccacccctgaaagaaacttgagaagatcctccatcattggtactatcggtccaaagaccaactctccagaggtgttggtttccttaagacaagctggattgaacatcgttcgtatgaacttctctcacggttcttacgagtaccaccaatctgtcgtcgacaatgccagaaagtctgaagaaatttatccaggtagacctttggccattgctttggacactaagggaccagaaatcagaactggtaccaccaaaggtgaaaccgattatgctattccaatgggtcacgaaatgattttcaccactgacctttccttcgccaagtcctctgatgacaaggttatgttcattgactacaaaaacattactaaagttatcgagccaggaaagatcatctatgttgacgatggtgttctttctttcgaagtcttggaagttgtggatgaaaatactttgaaagtcagatctatcaacgctggtgctatttcttctcacaagggcgtcaatcttcctaacacagatgttgatttgccagctctgtctgagaaggataaacaagatctgagattcggtgtcaagaacaaggtcaacatggtctttgcctcttttattagatgtgccaacgatatcaaggagatcagacacgttttgggtgaagacggtaaacagattcaaattattgccaagattgaaaaccaacaaggagtcaacaactttgatgagattctggaggtcactgatggtgtcatggtggctcgtggtgacctgggtattgagattcctgctcctcaagttttcgttgtccaaaagcaattgatcgcaaagtgtaaccttgccggtaagccagttatttgtgctactcaaatgttggagtccatgacttacaacccaagaccaactagagctgaagtttctgacgttggtaacgccattcttgatggagctgactgtgtgatgctttctggtgagaccgccaaaggaaactacccacacgaggctgttgctatgatgcaccacactgctcttatcgctgagtctgctattgcttacttgcctcactacaatgaaattaaggacttggctagaggattgattaacactgttgagactattgcaattgctgctgtctccgctcactttgaacagaatgctaaggctattgtcgttctgtccacttccggaacttctgccagaatgatctccaagtaccgtccaaactgtccaattttgatggttaccagaaatgacgaggcagcaagatactcccacttgtacagaggtgtttaccctttcatctacaagcaggaggttaacgacaactggcaacaggatgttgaagagagattgcaatacgctatcactgaggccatcggtatgggaatcttgaagaagggtgatgctattgttgccgttcaaggttggaccaagggtttgggacatactaacaccatgagagttgtttttgcttaa

SEQ ID NO: 3411 - DNA, 2106 bp, Artificial Sequence
  Optimized genes for Pichia pastoris
atggtctttcaagtcaacgttcctgtcggtgaagctagaaaaggtgagaccgctccaagaagatactacaaggtcaaagatgctgcagttttgaaaccatctgactgtaacccaaagactgaaaccgtttacgactatttggttgaaatgtttgaaagacatgaagataacaaggccatggcttggagagatctggttgacattcacaccgagaagaagaaggttaacaagatgattgatggtgagttaaagaatattgaaaaggagtggcaatactacgagctttccgactacaagttcattacttacaaagaacttaagtccatcatctttgagtatggtcgtggtcttgttgagctgggtattaagcctaaccaagaagagagattgcatatctacgcctccacttcacacaagtggttccaaacctacttggctactcaaacacagaacattccaatcgtcactgcttatgacactttgggagagtctggattgacccactccttggtccaaactggatctgtggctattttcactaacaatgatcttttgcacactctaatcaaccctctgaagaaagccgtttccgttcgtttcatcattcatacagagaagttggattcttcagacaagagatatggaggaaagctgtaccaagatgcccaagttgcaattgacgagattaaaagaactcatccagatatcaagtttatttcatacgatgaaattgttgctcttggtagaggttctaagctaaatgctatccctcctaaggcagatgatttatcttgtattatgtacacttctggttcaacaggtactccaaagggagttgtcttgtctcacagaaatgttcttgctggaattggtggtgcttctactttagtccctcgttctttaatcaatggtaaggatagaattatcgcttttttgccattggctcacatcttcgaattggtgtttgagttgatttctttgtggtggggtggatgtttgggttatgctaatgtcaagacacttactgatgcatctatcagaaactgtcaatctgatttgaaggctttcaagccaactatcatggttggtgttgctgctgtttgggaatctgtcagaaagggtatcctggaccaattaaataaatctccattcttgttgcaaaaggttttctggggagcttacaagtctaaacaagctatgaagtactgtcacattcctggaacttccattattgacgctgtcattttcagaaaggttaaagctgccactggaggtgagatccgtcttctgttgaacggtggttccccaatttccgctgatacccaaagattcattaccaacctgctggctcctatgttgctgggatacggtttaactgagactgtcgccaacacttgtatcactgacatcgacaacttcgagtttgacgttgccggtgctctgactggtgccgttactgttaagcttattgatgttccagaggctggttactttgccaagaacaaccagggtgaagttctgatccaaggagcttgtgttaccaaggaatactataaaaacgagcaagagactgcctctgtttttgattatgagaaaggatggttttctaccggtgatattggagaatggacttcttccggtcaattgaaggtcatcgatcgtaaaaagaacttgatcaagaccttgaatggagagtacattgctttggaaaagattgagtccgtctacagatccaactcttacatccacaacgtctgttgttacgctgaccagaacaaatccaagccagttgccattgccgtcccaaacgaaactactttgagaaagttagctgttcaactgaaattggccagtgctgtcgatgaggtcgacttggctaaggttgttcacgactccaagttgatctccaaagttcatcagtctcttcttgaaacagcaaagcaacaaggtttgactggtatcgagttgattcaaggtgtcgttattttggacgaagaatggacccctcaaaacggtttcgtcacctctgctcaaaaacttcaacgtaagaagatcttggagtcagtcaaggacagagttgatgaggtttatagacagaattcctaa

SEQ ID NO: 3412 - DNA, 774 bp, Artificial Sequence
  Optimized genes for Pichia pastoris
atgtccagagaagattctgtttacttggcaaagttggccgaacaggctgagcgttatgaggaaatggttgagaacatgaaaactgttgcatcttctggtcttgagttgtctgttgaagagagaaaccttttgtccgttgcttacaagaacgttattggtgccagaagagcctcttggagaattgtttcctccattgagcaaaaggaagaagctaagggaaaccaatctcaagtttctttgattagagagtacagatctaagattgaaacagaacttgccaacatctgtgaggacattctgtctgtcctttctgagcacctgattccatctgctagaactggtgagtccaaggttttttacttcaagatgaagggtgattaccacagatacctggccgagtttgctgttggtgacaagagaaaggaggctgctaacctgtccttggaggcctacaagtccgcttctgatgttgccgttactgagcttccaccaactcatccaatcagattgggtttggctttgaacttctctgttttctactacgagattttgaattctccagacagagcttgtcacttggccaagcaagctttcgacgatgctattgctgaattggaaactctttccgaggagtcttacaaagactctaccttgatcatgcaattgttgagagacaacttgactttgtggacttctgacatgtctgaaaccggtcaagaggagtcatccaactcccaagataagactgaagccgctccaaaggatgaagagtaa

SEQ ID NO: 3413 - DNA, 2529 bp, Artificial Sequence
  Optimized genes for Pichia pastoris
atggttaactttactgttgaccagatgagatctctgatggacaaggtaaccaacgttagaaacatgtctgttattgctcatgttgatcacggaaagtctaccttgacagattctcttgtgcaaagagctggtatcatctctgctgccaaggctggtgaggctagattcactgacactagaaaagatgaacaggagagaggtattactattaaatctactgccatttctttgtattccgaaatgggtgatgatgatgtgaaggagattaagcaaaagacagaaggcaactctttccttattaacttgattgactcaccaggtcacgttgatttctcctctgaagttacagccgctttacgtgtcactgatggtgctctggttgtagtggactgtgtcgagggtgtctgtgttcaaactgagactgttttgcgtcaagcattaggagaacgtatcaagccagttgttgtcatcaataaggtcgaccgtgctcttcttgagttgcaggttaccaaagaagacttgtaccaatcttttgcaagaacagttgaatctgtgaatgtcgttatcgcaacttacactgacaagactatcggagacaaccaagtttaccctgagcaaggtactgttgcatttggatctggattgcacggttgggcttttaccgttcgtcagtttgccaccagatactctaagaagttcggagttgacagaatcaagatgatggaaagattgtggggtgactcttactttaacccaaagaccaagaaatggactaacaaggataaggacgctgcaggtaagcctctggagcgtgccttcaacatgtttgttttggacccaattttcagattgtttgctgccatcatgaacttcaagaaggacgagattcctgttctgttggagaagttggagatcaacctgaaacgtgaggaaaaggaactagagggaaaagcattgttgaaggttgtgatgcgtaaatttttgccagctgctgacgccttgttagagatgattgtcctgcacttgccatctccagtaactgctcaagcctacagagctgagaccctttatgaaggtccttctgacgaccaattctgtattggaatcagagagtgtgatccaaaagctgaattgatggtttatatttcaaaaatggtcccaacttccgacaagggtcgtttctacgcctttggtagagttttctctggtaccgtcaagtccggtcagaaggtcagaattcagggaccaaactacgttccaggtaagaaggaggatctgttcatcaaggctgtccagagaactgtgttaatgatgggaagaaccgttgagcctatcgacgatgttccagccggtaacatcttgggaattgttggtattgatcaatttttactcaagtcaggaactttgaccaccaatgaagctgctcacaatatgaaggttatgaagttttctgtctccccagtcgtccaagttgctgttgaggttaagaacgctaacgatttgcctaagctggtcgaaggtttgaaaagactgtcaaagtctgatccttgtgtgttgacttacatttctgagtcaggtgagcacattgtggctggaactggtgagcttcacctggaaatttgtttgcaagatcttcaagacgatcatgctggtgttcctttgaagatttcccctccagtggttacttatagagaaactgtcaccaacgagtcttccatgaccgctttgtccaagtctcaaaacaagcacaacagaatttacctgaaggcccaaccaattgatgaggaactttccttggctattgaagagggtaaagttcatccaagagatgacttcaaagccagagcccgtattatggctgatgaatacggatgggacgttaccgatgccagaaagatctggtgtttcggtccagatggaaccggtgccaatcttgttgtcgatcagtccaaggccgttcaatacttgcatgaaatcaaagactccgttgttgccggattccaattggccactaaggaaggacctattttgggtgaaaacatgagatccgtcagagtcaacattttggatgtcactcttcatgccgatgctatccacagaggtggaggtcaagtcattccaaccatgaagagagtgacctacgctgctttcctgttagccgagccagcaattcaagaaccaatcttcttggttgaaatccaatgtccagagaatgctattggtggtatctactcagtcttgaacaaaaagcgtggtcaagtgattagtgaagaacaaagaccaggaactccattgttcaccgtcaaggcttaccttcctgtcaatgagtcctttggtttcacaggtgaactgagacaagctactgcaggacaagctttcccacaaatggtgtttgaccactgggccaacatgaatggaaaccctcttgaccctgcttctaaagtcggagagatcgttcttgcagctcgtaagagacagggtatgaaagagaacgtccctggttacgaggagtactacgacaaattgtaa

SEQ ID NO: 3414 - DNA, 1578 bp, Artificial Sequence
  Optimized genes for Pichia pastoris
atgttgagaacttctccagccaccaagaaggccttgaaatctcaaatcaatgctttcaacgttgcagctctgagattctactcttctttgcctttgcaagtcccaattaccttgccaaatggtaagacctacaaccaaccaaccggattgttcatcaacaacgagtttgttccttctaagcaaggaaaaacttttgccgttttgaacccatctactgaagaggagattactcacgtctacgagtctcgtgaagatgatgtggagttggccgtcgctgccgcccaaaaggcttttgactctacttggtccactcaagatcctgctgagagaggaaaggttctgaacaagttggctgatttgattgaagaacactctgaaactcttgccgctattgagtcattggacaacggtaaggcaatttcttccgctcgtggtgatgtcggtttggtcgttgcttacctgaagtcttgtgctggatgggctgacaaagtgtttggaagagtcgtcgaaaccggttcatctcactttaactacgtcagaagagaaccactgggtgtctgtggtcaaattattccatggaacttcccattattgatgtggtcttggaaggttggaccagcattagccacaggaaacaccgttgtccttaagacagctgaatcaactccattgtctgctttgtacgtgtcgcaattggttaaggaggctggtatcccagctggtgttcacaatattgtttccggatttggtaagatcaccggtgaagccattgctacccacccaaagatcaagaaagttgccttcactggttctaccgctactggaagacacatcatgaaggctgctgccgagtccaacttgaagaaggtcactctggaattgggaggaaagtccccaaacatcgttttcaacgatgccaacattaagcaggctgttgccaatatcattttgggtatctactacaactccggtgaggtttgctgtgccggttccagagtttacgttcaatctggaatttacgacgagctgttggcagagttcaagactgctgctgagaacgtcaaggttggtaacccttttgatgaggacactttccaaggtgctcaaacttcacaacaacagttggagaagattcttggattcgttgaaagaggtaaaaaggatggtgccactttgatcactggtggaggtcgtcttggtgacaagggttacttcgtccagccaactattttcggagatgttactcctgaaatggagatcgtcaaagaggaaatttttggtcctgttgttaccatctccaagttcgacaccattgatgaagttgttgacttggctaatgactcccaatatggtcttgctgcaggtattcattctgacgatatcaacaaagtcattgacgttgctgctagaatcaagtcaggaactgtttgggttaacacttacaatgatttccaccaaatggttccattcggtggtttcggtcagtctggtattggtagagagatgggtgttgaggcattggaaaactatacccaatacaaggctatcagagtgaagattaaccacaagaacgaatag

SEQ ID NO: 3415 - DNA, 876 bp, Artificial Sequence
  Optimized genes for Pichia pastoris
atgtacagaaacttgatcattgccacagctcttacttgtggtgcttactctgcctacgttccatctgagccatggtccactttgactccagatgcttcattggaatctgctttgaaggactactcacaaaccttcggtattgctatcaagtccttggatgctgacaagattaagagagaggctgtttctcaaatcggtgatggtcagatccaagctgctactatcacctccagtgaaccaaaggttactgcccaggttgtttctcagattggtgacggtcaaatccaggccaccacatcaacttcatcaaagtctaaggaaactgctcaagttgtctcccagatcggagatgagaccgctcaggtcgtcagtcaaataggtgacggacaaattcaagccactacctctacctcatctgaagtcaagcaaactactggtgtcgtttcccaaattggtgatggacagattcaggctaccaccgcaactacatctgttgcttctcaaattggagacggtcaagtccaagagtccaagccaactgacacttccgaagacaaaggtacttctgacttggtctcttgtttgaccgattcttctttggccttggttttggagaagggtgttctgaccgacgcccaaggtagaattggtgccattgttgccaacagacaattccaatttgatggtcctccacctcaagctggtaccatctacgctggaggatggtctatcactgatgatgccaagttggctttgggtaactccaccactttctaccagtgcttgtctggaactttttacaacctttacgatgaaaagatcggtgagcaatgtgagcctgttgagttggacattgtcgatttgattgaatgttaa

SEQ ID NO: 3416 - DNA, 840 bp, Artificial Sequence
  Optimized genes for Pichia pastoris
atgtctttgtccctggacaacattgtcccatctttcagattggacggttcagtttccattgttaccggtggctctggtggattggcttccgttatcaccaaggctttgcttgctcaaggttctgagattgctgttgttgacttgaacttggagagaactaaagaggctgccgagttgttgattgaatggggtaaggaaaatttggccaaggccaacggtggttctgttccaagagtcacttactgggcttgtaatgtcgctgatgctgctaatgttgaagaagttttcaccaacgtcaacaaggagcacggtaaattggcagagtacttggttcactgtgctggatactgtgagaacttcccagctcatgaatacccagccagaaacgctgaatctctggttcaagtcaatcttttgggttccttgtacgtttctcaatcttttgctagacctttgatcaagtctggacacagaaatggatctatcgtcttggtcggttccatgagtggtaccatcgttaatgatccacaacctcaagttgcttacaacatgtccaaggctggtgtcattcatttggctcgttctcttgcctgtgaatgggccccatacaatatcagagttaacactttgtctccaggttacattttgactccattgaccagaaacgttatttccggtcacactgagatgaaagactcttgggaatcaaaggttcctatgaagagactggctgagccaaacgagtttgttggtagtgttttgtatttgctgtctaagactggatcctcttacactactggtcacaaccttgttgtcgatggtggttatgaatgttggtaa

SEQ ID NO: 3417 - DNA, 1461 bp, Artificial Sequence
  Optimized genes for Pichia pastoris
atgttgaaatttggtcaaagaagattcctttctacttctagaattttggctcaagctatcaagcatgatgtcgttgttatcggaggaggaccaggtggttacgttgctgccattaaggccgctcagctgggacttgatactgcttgtattgaaaagcgtggtgctctgggtggtacttgtttgaatgtcggatgcattccatccaagtctttgttgaacaactctcacttgtaccacactattaaacatgacaccaaagaaagaggtatcaacgtcgctgatgttcaaattgacattggacaattgcaaaacgccaaagagaagtccgttaaacagttgactggtggtatcgagatgcttttcaagaagaacggtgttaagtactacaagggatctggttctttcgtcgatgagcacaccatcaacgttgatccagttgaaggtggagacaaagttgagttgaaggctgacaatgtgattatcgctaccggttctgagccatctcctttcccaggaatcactgttgacgaggagagaatcgtcacttccactggagctttggatttgaaggaagttccaaagagaatggctattataggaggtggaattattggcttggaaatggcctctgtttggtctcgtgtcggttccgaagtaactatcattgagtacagagactccattggtgcaggtatggatgctgaagttgccaagtcaactcaaaagtttttgaccaagcaaggtttgaagttcaaatgtggtgccaaggttaccaagggtgaaagggttggagaagtcgtcaacattgaaattgagactacaaaggatggtaagactgagcaatttgaagccgatgtgcttttggtcgctgttggtagaagaccatacaccgagggactgaatgctgaggcaattggtctggatttcgacaacagaggaaccttggttattgattctgaatatagaactaagcaccctcacattagagtcattggtgacgttactttcggtccaatgctggcccacaaggcagaagaagagggtattgctgcagccgagttcatcaagaaaggtcacggtcatgttaactacggtaacatcccttctgtcatgtacactcatccagaggttgcttgggttggtcagaacgaacaacaattaaaggaggctggaatcaaatacaaagtgggaaagtttccattcattgccaactccagagctaagaccaacttggacactgaaggatttgtcaagttcttggccgacgctgaaactcagagagttttgggtgtccacatcatcggtcctaacgctggtgagatgattgctgaggccggtcttgcattggagtatggtgcttctaccgaagatatcgccagagtctgtcacgctcacccaactttgagtgaagctttcaaggaggctgctcttggtacctttgacaagacaattaacttttag

SEQ ID NO: 3418 - DNA, 669 bp, Artificial Sequence
  Optimized genes for Pichia pastoris
atggctcgtagaccagctagatgttacagatactgtaagaacaagccattccctaagtctcgttacaatcgtggtgttccagacccaaagatcagaatttacgacttgggtagaaagaaggctgctgttgacgattttcctttgtgtgttcacttggtttctaatgaaattgaacaattgtcttctgaggctttggaagctgccagaatctgtgccaataagtacattaccactcaatctggaagagactctttccatttgcgtatccgtgttcatccataccacgttctgagaatcaacaagatgttgtcttgtgctggtgctgacagattgcaacaaggtatgagaggtgcttggggtaagcctcacggtttggctgcaagagtcactattggtcaaattttgatgtctatcagaaccaaggactccaacaaagctgtcgtcattgagggattgagaagatccagatacaagttcccaggtcagcaaaagattatcatttccaagaaatggggattcactccattggatagagaagactacatcgttaagagagcttctggtgagattagagatgatggtgcctacgtcaagtttttgactaagaagggtcctcttcaagagaacttggagcaattcccagattacaactacgctgaggccaactaa

SEQ ID NO: 3419 - DNA, 459 bp, Artificial Sequence
  Optimized genes for Pichia pastoris
atgtctcaaaacgagagaactttcattgctgtcaagcctgatggtgttcaaagaggattggttccagagattttgtccagattctggaacaagggttacaaactggttgctatcaagttgactcttgccaatgaagacttgttgagagagcactacgctgatttgacttccaaaccattcttcccatctttgctgtcttacatgttgtctggtcctgttttggccactgtttgggaaggtaaggatgttgttaagcaaggaagagctttgttgggtgctaccaacccattggcttccgctccaggtaccatcagaggtgactttgctgttgacatgggtagaaacattattcacggttctgactctgttgagtctgctgagaaggaaattggtttgtggttcaagaaggaggagttggtcgactacaagccaactttgacctcttggatttacgagtaa

SEQ ID NO: 3420 - DNA, 960 bp, Artificial Sequence
  Optimized genes for Pichia pastoris
atgaagttcggtttgggttcattaggattggccgttgctttgattccaattgcatctgccttgtacagagttgatgactacgagacttacgttcctaccactgtcggtcctcatccaaccggtgccattgagccagctgaagaccaagtcgatatcaaggttgaaccaactgtttactcccaattgttggatgagtttgagaacgttttaggtgagtctgatggtatggtcaaccatgacaacctggcctctatctggatgtctttctccatgattgtcgtttctgagattggtgacaagaccttcttgatcgctgctttgatggctatgagatctccaagatggttggtgtttgctggtgcttcatctgcattggttgttatgaccgttttgtcttgtattgtgggtcacattcttccaactcttttgactgagaagacaactaagactttggcttccattttgtttgttgtctttggtatcaaacttgccaaggaaggttttgaaactccaaaggatgttggtgtcgaggaagaattggcagaagttgaggaggagatcgccctgtcttccatcaacaacaaattggacgatgctgagactggatccgtctctggttccaacaagaagaagtaccaaaccaccctttctcacttgttggaagagaccaaggagttgctgtccttcatcttgtctcctacttttttgcaagttttcaccatgactttccttggtgaatggggtgatcgttctcaaattgctactattgccatggccgcttctgctcaattctacttcgtcattgttggatctgttctgggtcatgctctgtgtactggtattgctgtcttgggtggtaagttgcttgctggacacatctctttgagagctgttaacttgggaggttctctggctttcttcatttttgcctttatctacttgtatgaaatttacatgtaa

SEQ ID NO: 3421 - DNA, 1296 bp, Artificial Sequence
  Optimized genes for Pichia pastoris
atgaagatttctgccttgactgcttgtgctgtcactttggccggtttggctattgctgccccagctccaaagccagaggactgtaccaccacagttcaaaagcgtcaccaacacaagagagctgttgcctacgactatgtgtatgttaccgtcaccatcaacggtcaaggtgaaaccatttccccaaccgttgtcgctgaattggagactgtgtcaactccagccacttcttcttccgccgttgctacttcttccgctcctgctaccacctcatccatcccagaaactacatctgctcaagttactacttcatctgtggctgagtctaccagtgcccaattcacttcctctactgaggaggcttcttcgtccgttgagcaaactacccaatcttcctcatcttcttctccttccagctctagtagttcaagttcgtcatcaggatcttcatccggttcctccagcggaggaattgacggtgacttgtcttggtactctggtcctggaaacaagttccaagatggaactatcaagtgttctgagttcccatccggaaatggagttgttgctttggaccacttgggtttcggtggatggtctggtctgtaccacccttctgacacttccactggtggtatctgtgagccagatacttactgctcctacgcctgtcagtctggaatgtctaagactcaatggccatctgaacaaccagacaacggtgtttctgttggtggtctttactgtgattctgatggctacttgtacagatccaagaaggacaccgattacctgtgtgaatggggtattgatgttgcttacgtcgtttccgagattggtaagaccgctgctatctgcagaactgactacccaggtaccgagaacatggttattccaactgtcgtctctccaggaggtgagttgccattgaccactgttgaccaatccagttactacacttggagaggtatgaaaacctctgcacaatattacgttaacgatgctggtgtcgactggactactggatgtacatggggagactacggtactgattatggtaactgggctcctttgaactttggtgctggttacgataacggtatctcatacttatctttgattcctaacccaaacaacaaagactctctgaactacaacgtcaagatcgttgcttatgatgactcctctgtcgtcattggagaatgtaagtacgagaatggttcttacaatggtaacggatccgatggttgtactgttgccgtcaactctggaaaggctaagtttgttttgtactaa

SEQ ID NO: 3422 - DNA, 513 bp, Artificial Sequence
  Optimized genes for Pichia pastoris
atgactagatactctgctgttcctgccaacccagacagatctgcctccgctagaggttcttatttgagagtttctttcaagaacaccagagaaactgctcaggccgttaacggttggaacttgaagaaggcacaacaatacttggatcaagttttggaccacaagagagctattccattcagaagattcaactcctccattggaagaactggtcaaggtaaggagtttggtactgacaaggccagatggccagccaagtctgtcaagttcattcaagatttgctgaagaatgctgaatccaacgctgagtccaagggtttggacattgactctttgattatttctcacattcaggtcaaccaagctccaaagttgcgtagaagaacctttagagcccacggtagaatcaacgcttacaactcttctccatgtcacatcgagttgatcttgtctgaaccagatgaggccattgagaaggctaaggaagagccagctcaattgactgaggcttaa

SEQ ID NO: 3423 - DNA, 1131 bp, Artificial Sequence
  Optimized genes for Pichia pastoris
atgtcttccattgctttccacaccttcagaggttccagagctaagatggctactgctctgctgttgaccggagctgttggtgctggatcttaccactacgagaagaagagaagacaattcaacaatagaaacaacaataacaataacaacaagaacaacaaaaactttgccaaggctttgttcggtttctccactggtaccgctgctgccactttgactgacgaatccaaggtcaaggttgccaccttatctgacattcattctttcaaggagtatcaacaagtttacaacgatattgccaagaaaattgaagatgaggatgattttgatgttgatggttctgctggtcctaacttggtcagattggcttggcactccgctggtacttacgacaagtatgataagaaccctcataccaacggaggttcatacggtggaactatgagattctctaaagagggtggtgacggtgccaacaacggtttggcaaagggaagagagttcttggagccattgttgaagaagtacacttggttgtctcacggtgatttgtggactttggccggtgttgttgctattcaagagatgggtggtccaaaaatcaaatggagaccaggtagaaaagatctgtctgaagagtaccaagctcctaatggtaagcttccagatgctgctcaaggtcctgactacgttagaaagttctttaacagattggactttactgatagagaaatggttgcattgattggtgctcacactttgggtagatgtcacgttacttcttctggttacgatggcccatgggacttcgccccaaccatgtttgacaatggattcttcactcaattgcagaagggtgtcggatccggtgaaggtcaatggcatttgagaaagtgggatggaccagagcaatacgaagacaacaactccaactctttgatgatgttgccagctgacatggccttggttcaagatcctaaattcaaaaagattgttgacgagtttgcagcttctcaagaagcttttttcaatgaatttgctccagccttccaaaagttgttggaatctggtatccacttcccaaaggaatcaaaagaattggtgtttagaactttggatgaacaatcttga

SEQ ID NO: 3424 - DNA, 1533 bp, Artificial Sequence
  Optimized genes for Pichia pastoris
atgtctcaacctcctaaatggactacttccaacggagctcctgtttctgatgtctttgccaccgaaagagctacttttgacaacgccaaccacgctaacaacgctccaaaggttggtcctttgttgctgcaggatttccaattgattgactccttggctcactttgatagagagcgtattccagagagagtcgttcatgctaagggtgccggtgctttcggagagtttgaagtcactgatgacatttccgatgtttgtgctgcaaagtttttggacactattggaaaaaagaccagaattttcactagattttcaactgttggaggtgagaagggctctgccgattccgctagagaccctcgtggtttctctaccaaattctacactgaggaaggtaatcttgatttggtctacaataacactccaatttttttcatcagagatccatccaagttccctcatttcattcacacccaaaagagaaatccagctaccaacttgaaggatgctaacatgttctgggattatttggttaacaaccaagaatctattcatcaagtcatgtacttgttcagtgacagaggaactccagcctctttgagaaagatgaacggttactctggtcacacttacaagtggtacaacaagaagggagaatgggtttacgttcaagttcacttcaagtctgacttgggtgttgttaacttcaacaatgaagaggctggtaagttggcaggtgaagacccagactaccacactggtgatctgttcaatgctattgagagaggtgagtatccttcttggacctgttacattcagaccatgactcaagagcaagctgccaagcagccattctctgttttcgacttgaccaaggtctggccacacaaggactttccactgagaagattcggtaagtttactttgaacgagaaccctaagaactactttgctgaggttgaacaggccgccttctccccatctcacaccatcccatcaatgcaacccagtgctgatcctgtgcttcaatccagactgttttcttacccagatactcatagacacagacttggtgtcaactatcaacagattcctgtcaactgtccagttgccccagtcttcacccctcaaatgagagatggttctatgaccgtcaatggtaacctgggttccaccccaaactacaaatcttctttctgtcctttctccactgaagctcaaatccaaactaactctcatactcctgaggaggtcttggccgctcatacagaaaagttccactggggtggtattttggattctaagtcctacgacttcgaacaaccaagagccttgtggaaggtgtttggaaagactccaggtcaacaaagaaacttttgtcacaacgttgctgtccacgttgcagctgctaaccatgagattcaagatcgtgtttttgagtacttctcaaaagtttatccagaaattggtgaccaaattcgtaaggaagttttgcaactgtctccaagaggtgactctgctgccagattgtaa

SEQ ID NO: 3425 - DNA, 1257 bp, Artificial Sequence
  Optimized genes for Pichia pastoris
atgcaattcggtaaggttttgttcgccatttcagcattggctgtcactgctttgggtgaaaccacttcaagtttgtctgctaccttgacctctaccaccagaatttccattgcttctggatgttctctggaggacttcaccgccaccgctcagtccaaccttgatgagctgtctgactgtgaggctgttagaggtgacattcacattgctggatcccttggttccgctgctattgccaatgttaaggctatctatggttctttgattgtcaagaacgccacatcattggtctccttgacagctgattctcttactactatcactgagcaattggccctttctgagttgactattttggataccttatcatttgcccaactgacctccgttggatcgatctactttgttactttgccagctctggaagaaactggtttccacaccggtgtcagtgacaccgagtctgtctacatttctgacactgccttgaccaacctggatggtattgttgccactgacgttgatgttttcaacgtcaataacaacttcaatttggacactgtcgactctcacttggagactgtttcaagtgctttagaggtttccttcaactctgatgacgttgaagtttctttcgacaacttgttgtgggctaacaacattactttcagaaacgttgcatctgtttcgttgaacaatcttacaaccgtcaacgcttccttaggattcattgaatctggtttccaaaagttgagttttccaggtatcactagagttggtggttcattctccatcgttgacaatgacgatttggaagagattgacttttccaatgtccaatcaattggtggtggattgatcatcgccaacaactccaagctgactgatttttctgaatgggaagacttgcaaactgtgggaggtgctttggttcttgagggatcttttgataacggttctttcccatctttgagagccgttcgtggtgccttctctttagaatcagatggagacatctcttgtgatgatttcagtgatatcagaggtgatactgcaggtgagtaccaatgttccgctgcctccttttcaacttctgcctctgctcaatcttcttcctcctctacttccaccggaggaagttcaacccacactggatcatccactgctacttcttcatcttccgaagatgctggtgttgctcttgctccagccagtctgttcactcttctggcttctatcgtcttgggatttttgtaa

SEQ ID NO: 3426 - DNA, 1512 bp, Artificial Sequence
  Optimized genes for Pichia pastoris
atggtcgttccaagactgtactactctacctctagagctgctcttcaaactgcccgtgccaatcaacgtcttgcaagaggattggccaccgccgctgcctctacaggtaaagttagagctgtcattggagctgtggtcgacgtccaatttgagcaaggtcaattgccagacattttgaacgccttggagttgcagaacggtgaccaaaagctggttttggaagttgctcaacatttgggagagaacactgtcagaaccattgctatggacggaactgagggtttagttcgtggtacctccgtcaccgacactggttctccaatctctgttcctgttggaagaggtactttgggccgtatcattaacgttattggtgagccaattgatgagagaggtcctattgaatgtaagcaaagaaacccaattcatgctgaccctccatccttcgtcaaccaatctactgctgctgaggtcctggaaactggtatcaaggtcgtcgatctgctggctccatacgctcgtggaggaaagatcggtttgttcggaggtgctggtgttggtaagactgtgttcattcaggaattgatcaacaacatcgctaaggcccacggtggtttctctgtctttaccggagtaggtgaaagaactagagaaggtaacgacttgtacagagagatgaaggagactggtgtcatcaatcttgagggagactccaaggttgcattggttttcggtcagatgaacgagcctcctggtgccagagccagagtcgctttgaccggtctgactattgccgagtactttagagacgaggaaggacaagatgtcttgttgtttgttgacaacattttcagatttactcaagccggatctgaggtttctgctctgttgggtagaatcccatctgccgtcggttaccaaccaactcttgctactgatatgggtcttctgcaagagagaattactaccacccagaagggttccgttacttctgtgcaggctgtctacgtcccagctgatgatttgactgacccagccccagcaaccacttttgctcacttggatgccactactgttctgtccagaggtatttctgaactgggtatctaccctgctgttgatccattggactctaaatctcgtttgctggatgtggccgttgtcggacaggagcactacgaggtggctacccaagttcaacaaaccttgcaagcttacaagtctttgcaagacatcatcgccattcttggtatggatgaactttccgaacaggacaagcttactgttgagcgtgctagaaagattcaaagattcttgtctcagccattcgctgttgctgaagtcttcactggaattccaggtcgtttggtcagattgaaggacaccgttagatctttcaaggaagttcttgatggtaagtacgaccaccttccagaaaacgctttctacatggttggtggtattgaggatgttgttgccaaggctgagaagttggctgcagaggctaactaa

SEQ ID NO: 3427 - DNA, 1731 bp, Artificial Sequence
  Optimized genes for Pichia pastoris
atgtctttgatcggtggaggttctgactgtgctgccggatccaatcctttggcccaattcactaagcacacccaacatgacacttctcttcaacaatcaatgcgtaacggtgagtttcaacaaggtaaccaaagaatgatgagaaatgaatccaccatgtcccctatggaaagacaacagatggatcaatttatgcagcagcagaataacccagctttcaacttccaaccaatgcagcacgagctgaacgttatgcaacaaaatatgaatgctcctcaacaggttgccaacaactcttggaatcaagagttccgtatgaaagatcccatggttgctaatgccccatctgctcaagtgcaaactccagttcaatctaccaattgggctcaagatttccagcaagccggtcctgaggtccagcatcatgctcagcaacaccaacatccaattttgtccgttcctggtgttcgtgctggtatttatggtggcggtagactgatgggtggttccatgatgaacagagctgctcaaatgcaacagcagaacccagcccaagctcagacctctgagcagtctcaaactcaatgggaagatcagttcaaggatatcgaatctatgttgaactccaagactcaggagccaaagaccaagcaacaagaacagaacacttttgaacaagtttgggatgatattcaagtctcttacgctgacgttgagttgactaacgaccagtttcaggctcaatgggagaaggactttgctcaatatgctgaaggtcgtttaaactacggtgagtacaagtacgaagagaagaaccaatttagaaacgatccagatgcatacgagattggtatgagattgatggagtctggtgccaagctgtctgaagctggattggcttttgaggctgctgtccaacaggatcctaagcatgtcgatgcttggttgaagttgggtgaagttcaaacccagaacgagaaagagtccgatggaattgccgctttggaaaagtgtcttgaattggacccaaccaaccttgcagcattaatgactcttgctatttcctacatcaatgacggttacgacaacgccgcctacgccactttggagagatggattgaaactaaataccctgacattgcttccagagctagatcttctaaccctgatttggatggtggtgacagaatcgagcaaaacaagagagtcactgagttgttcatgaaggccgcacaattgtctccagatgtcgcttctatggacgctgatgttcagactggtcttggtgtcctgttctactccatggaagaattcgacaaaactattgattgtttcaaagctgccattgaggttgaaccagacaaggctttgaactggaaccgtctgggtgctgctttagctaactataacaaaccagaggaggctgttgaagcttactctagagcattgcagttgaatccaaactttgttagagcccgttacaacttgggtgtttctttcatcaacatgggaagatacaaagaagccgtcgagcacttgttgaccggtatctccttgcatgaagtcgaaggagttgatgcctccgaaatgtcatccaaccagggtttgcaaaacaacgctctggttgagaccttgaaacgtgccttcttgggaatgaacagaagagacttggttgacaaggtttacccaggtatgggtctggctcaattcagaaagatgtttgacttctaa

SEQ ID NO: 3428 - DNA, 414 bp, Artificial Sequence
  Optimized genes for Pichia pastoris
atggctagaaccaagcagactgctaggaaatctactggtggtaaggccccaagaaagcaattggcctccaaggctgccagaaagtctgctccatctgctgctggtggtgtcaagaaaccacacagatacaagccaggtactgttgctcttagagagattagaagatttcaaaagtccactgagttgttgatcagaaaattgccattccaaagattggtcagagaaattgctcaagatttcaagactgatttgagattccagtcttccgctattggtgctttgcaagagtctgttgaggcttacttggtttctttgtttgaagacaccaacttgtgtgccattcatgccaagagagtcactattcagaagaaggacattttgttggctcgtagactgagaggtgagagaagttga

SEQ ID NO: 3429 - DNA, 312 bp, Artificial Sequence
  Optimized genes for Pichia pastoris
atgtctggaagaggtaaaggtggaaagggtttgggtaagtctggtgctaagagacacagaaagattttgagagacaacattcaaggtatcaccaagccagctattagaagattggctagacgtggaggtgtcaagagaatttctgctttgatctacgaggaagttagagctgttttgaagaccttcttggagaacgttatcagagatgctgtcacttacactgagcacgccaagcgtaagactgttacttctttggatgttgtttacgctctgaaaagacagggtagaactttgtacggtttcggtggttaa

SEQ ID NO: 3430 - DNA, 588 bp, Artificial Sequence
  Optimized genes for Pichia pastoris
atggctccaattattcaaaagcctgctccttttttcaagaagactgctgttgttgacggtgtgtttgaggaggtttctttggaccaatacaagggtaagtgggttcttttggccttcattcctttggcattcactttcgtctgtccaactgagatcattgcttactccgaggctgctaagcaatttgctgaggagggagctcaagttttgtttgcctctactgactctgagtactctcttcttgcttggactaacgttgccagacaagatggtggtttgggtccagtcaacattccattgttggctgacaccaaccacactttgtctaaggactacggtgtcctgattgaggaagaaggtgttgctttgagaggtattttcttgattgacccaaagggagtcttgcgtcaaatcaccatcaacgatttgccagttggtagatctgttgaagagtctctgagattgttgaaggctttcaagttcaccgatgagcacggtgaagtttgcccagctaactggcaaccaggtgctgatactatcaagccagaggtcgatgcttccaaggagttcttctccaagtctaaataa

SEQ ID NO: 3431 - DNA, 225 bp, Artificial Sequence
  Optimized genes for Pichia pastoris
atgttcagattggctgccagacaaactccaaagagaatgttttctacttccagagttgctgcttctggtgctcacggtgatgttggtccttactctaacttgcctttcaaggtcaagaacagaagagtcccatacgctgttccacacttcttgttcttcgccattggtatgggtattccattctttgcttgttacgttcaattgaagcgttccggttctatctaa

SEQ ID NO: 3432 - DNA, 1269 bp, Artificial Sequence
  Optimized genes for Pichia pastoris
atggagagattgtcccaattgagaaagcatttggccggtgacgatccagtcgaaagactgacagctaagaattcagatgatgttgtcattgttgctgcctttagaaccgctgttactaaaggtggaaagggtaagtttaaggatgtcaattctgacgtcttgttgcaaaaattgattgaaggtttgtttgaacagaagcttcctccaggtttcgacaaatctttgatcgaagaagttacagttggtaatgttttgaaccctggtgcaggtgccaatgaacacagagctgccatgttggcagccggaatcccttcctctgttccattcttggctatcaacagacaatgttcttccggtctgatggccgttaacgacgttgccaacaagattttggtcggccaaattgcatgtggtcttgctgctggagttgaatctatgtcttctaactacggtccttctgctatgccaaaagtttccaagtctgtgttgaagcaccctgagggtgccaaatgtatgattccaatgggtatcaccaacgaaaacatcaactcaaagttcggtatttccagaactgctcaagacgagttcgcttccaactcttaccaaaaggctgaaaaggccgtcagagagggacaattcagagaggaaatcatcccaattcaagtggaggttgaggatgaagatgatgagaacgatgacgacgatgctccagccaagactaagaccattactgttgaccaggacgaaggaccaagacctaacgttaccgtcgagtctcttggtaaactgagaccagctttcaagaaggacggttctactcatgctggtaacgcttctcaagtctctgatggtgctgctgttgttcttttgatgagaagaaacatggctcaggatctgaacttgccaatcttgggtaagtacattgcttgtactaccgttggtgttcctcctgaaattatgggtgtcggtccagcttacgccattcctgctgttctgaagttggttgatttgccaaaggagaaggtcactgtctacgagattaacgaggcttttgctggtcaagctttgtactgcattaataaggttggattggacaagaacaaagtcaacccaaacggtggtgctattgccctgggtcacccattgggatgtaccggtgctcgtcaagtttctaccatcatgagagaattgaaaccaggtgagatcggtgtcacctccatgtgtattggtactggtatgggagctgcagctgtctttgccagagagtaa

SEQ ID NO: 3433 - DNA, 516 bp, Artificial Sequence
  Optimized genes for Pichia pastoris
atggctgctgttttcttcccaagaacttgtttcaagtgtggtgaagttggtcacttggctgagaactgtcagcaagagcaaaagctgtgttacaattgcagagctccaggtcatgagtctaacgattgcccagagccaaagcagacttcttctaagcaatgttataattgtaatgaaactggtcacgttcaatctgaatgtgagcagcctaagaaggccgccaagtgctactcttgtggtaagttgggacacttctctagacactgtccaaactcttcatctgcctcttctgctggtccagttgcttcttcctccactatctgttacaagtgttctggtcctaaccactttgctagagattgtcaagctggatctccaaaatgctatgcttgcggtaaattgggtcacatttccaaggactgtactgtttccggtggttctaccaaggcttgttacaactgtggagaacaaggtcacatctccagagactgtcctccaactgctgaagccaactaa

SEQ ID NO: 3434 - DNA, 327 bp, Artificial Sequence
  Optimized genes for Pichia pastoris
atgccaccaaagatccaacaatctaaagctgccaaggccgctgctgctatggctggttctaagaagtccaagaagaaatggtctaagggtaaggtcaaggacaaggctcaacatgctgttattttggagcaagataagtacgacagaatcatgaaggaagttccaacttacagatacgtttctgtttccgttttggttgatagattgaagattggtggttccatggccagagttgctttgagacaattggaaaacgatggtgttatcaagccagttctgttgcactccaagcaacagatctacaccagagctactgcttctgagtaa

SEQ ID NO: 3435 - DNA, 975 bp, Artificial Sequence
  Optimized genes for Pichia pastoris
atgtctaactccttagagcaattgaaggcagctggtactgttgtcgttaccgacaccggtgaatttgagtctattgctaagtacactccacaagatgccaccaccaacccatctctgatcttggctgcctccaacaaggctgagtacgctaaattgattgatattgccgttgattacgccaagaagcaaggtggttccgttgaggaacaagccaacattgcccttgacagattgctgattgagtttggtaaggaaattcttaagatcgttccaggaagagtctctactgaagttgacgccagactgtcttttgacaaggaagctactatcaagaaggctcttgagattattgaattgtacaagtctgttggtgttgaaaaggatcgtattttgatcaagattgcatctacatgggaaggaattcaagctgctagagagttggaggccaaatacggtattcattgtaacttgactttgttgttctctttcgttcaggctgttgcttgtgctgaagccaaggtcactcttatttctccattcgtcggtagaattctggactggtacaaagcatccactggaaaggactacaagggtgatgaagacccaggtgtccaatctgtcaaggccattttcaactactacaaaaagttcggttacgacactattgttatgggtgcttcctttagaaacactggtgagatcaaagctttggccggttgtgatttcttgaccattgctccaaagcttttggaagagctgctgaactctaaagagccagttcctcaaaagttggacgcttctgccgcctcttctttggatatcgagagagtttcttacattgacgatgaggctgctttcagatttggattgaatgaagatgctatgtcaactgagaaactttctgaaggtatcagaaagttttctgctgactgtgttactctgttgaaccttctgaaggagaaggttcaagcttaa

SEQ ID NO: 3436 - DNA, 2766 bp, Artificial Sequence
  Optimized genes for Pichia pastoris
atgagatttttggtttcctctttcagacctttccgtcacactatttcatctcacatctccatgggtcaagctttatccgctatcagagtcttccacaagaactcccattctagaactcaaggcttgagaagacactcccactactgttgtcaccgtaagatcgacatgtccacctcaactaaacttcctgagagacaattattaccagctaacgtcagaccaaccaagtacgatttgaccttggaacctctgttctctacttttaagttcaatggagaagagactattcatttggatgtgcaagaggattccagttctataactttgcatgctttggacattgaccttcaagactctttgctgattacttcaaacaagtccaagactcctcctttgcacgttacaagcaacgatgacgaccaaagtttgacattccaattcaaagagggaactcttgtcaaaggagataaggttcagttgcaactgaaatttgttggagagttgaatgataaaatggctggattctacagatcctcttatgaagaaaacggtgagaccaagtacctggccaccacacaaatggagcctaccgactgtcgtagagcatttccatccttcgatgagccatctctaaaagctgttttcaacattgcattaatcgccgaccaaaagttgacttgtttgtccaacatggacgtcaaggaggaacagtctttgggagacagaagaaagaaggtcattttcaacccaactcccttgatctcgacttatttgattgctttcattgttggtgacttgaagtatattgaggctgactacaactacagaattccagttagagtttacgctactccaggactggagaagcaaggtcgtttctccgtggaattggctgctaagacattggagttttttgagcaacagtttgacatcgattacccattgccaaagatggatatggttgctattcacgacttttctgccggagctatggagaactttggtctagtcacttaccgtgttgttgacctgttgtacgacgaaaagaactctaaccttgccactaagcagagggttgccgaggttgtccaacatgaacttgctcaccaatggttcggtaacttggtcaccatggaatggtgggaaggtttgtggcttaacgagggttttgctacctggatgtcatggtactcttgtgacaagtttttcccagattggaaagtctgggaacaatacgttactgattctttacaacaagccttggcattggatgcccttagagcttctcatccaattgaagttcccgtgaaaagagccgatgagatcaaccaaatcttcgacgccatttcttactccaagggtagttccttgttaaagatgatttccaaatggttaggtgaagacgtattcatcaaaggtgtttcatcatacttgaagaagcacagatacggaaacaccaaaaccaccgatctgtgggagtcattatctgaagtctctggtaaggacgttgttaaggttatgtctatctggactggaaagatcggtttccctatcatctctgtcactgagaatgccaacagaatcactttcacccaaaaccgttacttaaccactggtgatgttaccccagaggaggatactaccatttatccagtgtttcttggtctgaagaccgagtcttccactgacgagtccctggttcttgattcaagatcaatgagtgttgatattcagaactcagacttcttcaaggtcaacgctgagcaagcaggtatctatagaaccaactatgctccagaaagatggatcaagctgggtaaacaaccacacttgttgtctgttgaagatagagctggtttagtggctgatgctggtgctttggcttcaagtggtcactcttctaccagaaacttcttgaacctggtcaattcttggaaggatgaatcctcatttgtcgtttgggatgagattacctccagagttgcagctctaaaggccgcttggttgtttgaatcacaatccgacattgacgctctgaatgctttcgttcgtgacttgatctcaacgaagattaagtctattggatggtcttttaacgacaacgaaccattccttgagcagagattgaaatcccttttgtatgcaactgctgccggtgccaaagttcctggtgtggttaaatctgctctgatcaattttcaaaaatacgtcgctggtgacaagactgccatccacccaaacatcaaggctgtcaccttccagactgttgctgctcaaggttctgagaaggaatgggatcaattgttggacatctacaagaatccagtctccattgatgaaaaaatcattgctttgaggtcattgggtagattcgaggacccaatcttgattgccaagaccttagctcttctgtttgatggttccgtcagatctcaagatatctatgttccaatgcaaggattgcgtgctacaaagattggtgtcgaatctcttttcaagtggttgactttgaactgggacaaaatttacaaattgcttccaccaggtctttctatgttgggttcagttgtgaccatcagtacttccggtttcacttctctggatgatcagaagagagtcaaggatttctttgcctctaaagacaccaagggatttgaccagggtttggcccaagctcttgacactatccaatctaaggcttcctgggttcaaagagactcccgtaacgtttctgactggctgagagaacaaggttacaagaaataa

SEQ ID NO: 3437 - DNA, 1581 bp, Artificial Sequence
  Optimized genes for Pichia pastoris
atgatgacagaccaaattggtaaccaagcttctcctgcctctaattcttacttgaacaacgatggtattgatgagcttactccaatgactagaagaaaaagagtttcctctctgtcattgtcagatcagtgggctggttctttgcagatgacccctactaccggttccaccggaaacctgaagagaatcggatcttccaagctgtccatcaacaacggactgaacgctgtcagagtcaagaagactgttatcgatcatgttagagtcgcttcatacgctttcgcatttgacattgacggtgtcattgttaagggtccagaaactattccagaggctaaggaagctttgaagttgttgaacggtgctaatgaatacaacatcaaggttccttacattttcgtcaccaatggtggtggaagagccgaacaagccagagctgaggaactttctaagagattggatatcgaggtcactgaggaccaggtcatccaaggtcacactcctatgagagaattagtttctgtttataacaatgtcttggttattggaggagttggagatgcttgtcgtaaagttgctgaaaaatacggattcaagaacgttttcactccacttgatgtcatgaagtggaacccatctgtcaccccataccacaacttgacagaggaagagttggccgttgctagagacgttgacttctccaacactggtatcgacgccattctggtcttcgctgactctcgtaactgggctgctgatcaacaaatcatcttggagctattgctttcaaagtctggtttcatgggaactgtgtctgattcttttgaagaaggtcctgctctgtactttgctcactccgattttgtttgggccaccaactacaatttgtccagatacggtatgggtgccttgcaagtctctattgctgccttgtacagagaacatactggaaaagagctgcaagttaccagattcggtaagcctcaaagaggtaccttcaaattcgcctccaaggtcttgtctcaatggagaaaggatgttttggaagagcacgttgaagaattgaccaccgaggagggtacttctgacatggaagagcaatctccaggtgacccattattgaatgatccttctcagaacatgaacagaaactccaagccaactcttttggctactgaatctgagtccgagtctgactccgacaacgagggattgaccgttgagaagctttccaaactgaccttggacttgccaccagcttccactgtctacttcgttggtgatactcctgaatcagacatcagatttgccaactctcacgatgaatcttggtactccattttggtcaagacaggtgtttaccaagagggctctatcccaaagtacaagcctaagcacatctgtgagaacgtcctggaagccgtgaaatttgctattgagagagagcattctaaggagttagaagaatggaataactctgctgttgatccagatgccgccactactcaattgtccccattgactttggtggaggagaccaaggttgttccaaagaaacactctgccaagtttgagatgtaa

SEQ ID NO: 3438 - DNA, 885 bp, Artificial Sequence
  Optimized genes for Pichia pastoris
atgtctgacccaaagcctttgccatttgtttaccaattcctttcaggagctattgctggtgtttctgagattcttgtcatgtacccattggatgtcgttaaaaccagaatccaattgcaagttggatccggtgccaacgctgagtacactggtatcgttgactgtgttaccaagatcgtcaagaacgagggtttttctagactgtatagaggtatttccgctccaattttgatggaagctcctaagagagctacaaagtttgctgctaatgatgaatggggtaagttctacagaaacgcatttggtgttcaatccatgactcaatctttggctgttttgaccggtgctaccgctggagccactgagtctttcgttgttgttccttttgaattggtcaagattcgtttgcaggacaagtcttccaagtactctggtatgggtgacgttgtcaagcaaattgttaagaaggaaggtgtcttgtccctgtacaatggtttggaggctactttgtggagacacatctggtggaacgccggttacttcggtgtcattttccaagtcagatctctgttaccaaagaccgagtcctctacccaaaagactgctaacgatttgttgtctggagccattggtggtactgttggtaccatcttgaacaccccattcgatgttgtgaagtccagaattcaaaacactgtcaaagttccaggagtcgtcccaaaatacaactggactcttccatctcttcttttggttactaaggaggagggattctctgctttgtacaagggtttcttgcccaaggttctgagattgggtccaggtggaggaattctgttggtggttttcaccacttgtatggatttcttcagaactttacagtaa

SEQ ID NO: 3439 - DNA, 546 bp, Artificial Sequence
  Optimized genes for Pichia pastoris
atgtcttccactaacactgtcccaccagtttctcaatacaaagagtttgaggttattggtagaagattgccaactgagactgttccagagccaaagctgtatagaatgactatttttgctaagaacgagaccattgccaagtctcgttactggtactttttgcaaaagttgcacaaggttaagcgtgcttctggtgagattgttgctatcaaggaagttttggaagagagacctactgaagtcaagaccttcggtatctggatcagatacgactccagatccggtacccacaacatgtacaaggagtacagagatgttaccagagtcggtgctgttcaaggtatgtaccaagatttggcctctagacatagagctagattcagatctatccacattttgaaagttgttgagttgaccaacgatgatgacattaagagacaatatgttcgtcaattcttggagaaggacttgaagttcccattgcctcacagagttcctaagactcaagctttgtacgcttccaagagaccatctactttctactaa

SEQ ID NO: 3440 - DNA, 306 bp, Artificial Sequence
  Optimized genes for Pichia pastoris
atgtctttcgtcatcagaagaaagttgtctactttgattccacctaagattgcttctgccaagaacttgggttccaaccctcatgctaagaagatccaagaggttgtcaagttctacaaggctttgcctcaaggtcaagcttccttcccaaaggcctcttctccaattggtaagtatggtgaaaagtacttcaacgatggtaacgcttcagccaaaccattgttgcatttggctcttggtgttattttgttcggttactctttggagtattactaccacttgagacaccacaagggtgagcattaa

SEQ ID NO: 3441 - DNA, 1311 bp, Artificial Sequence
  Optimized genes for Pichia pastoris
atggctatctccaaggtttttgctcgttacgtctacgattccagaggtaaccctaccgttgaagttgatttgtatactgaaaagggattgttcagagctattgtcccttctggtgcttctactggagtccacgaggccttggaattgagagacggtgacaaatccaaatggttaggcaagggtgttctgaaagccgttgccaacgtcaatgatattattgctcctgctatcgtcaaagctaacattgacgtcaaggaccaagaagctattgatgctttcttgaacaagttggatggtactcctaacaaaggtaagctgggagctaatgctgttttgggtgtctctttggctgcagccaaggctggtgcagctgagaagaacgttccattgtaccaacacattgccgatctttctggcactccaaagccatacgttcttccagtcccattccagaatgtcttgaatggaggttctcatgctggtggtgctttagccttccaagagttcatgattgttcctactgacgctccaactttctctgaggctcttcgtatcggtaccgaggtttaccacaacttgaagtcccttgctaagaagacttacggtcaatctgcaggtaatgttggagatgaaggtggagttgctccagacatttccaccccaaaagaggcacttgacttgatctctgctgccattgagaaggccggttacactggtaagattggtatcgctttggacgttgcatcttctgaattctacaaagatggaaagtacgaccttgatttcaagaatccaaactctgacccatctaagtggttgtctggacaggagcttgccgctctgtacaaggagttgatttctcaatacccaatcgtttctatcgaagatccatttgccgaagacgactgggctgcttggtctcacttcttctccactgttgacatccagattgttggtgatgacttgactgtcaccaacccaattagaatcaagagagcaatcgaggagaaatctgccaatgcccttttgttgaaagtcaaccaaattggaactttgaccgaatccattaaggctgctactgattcttacgctgctggatggggtgttatggtttcccacagatccggtgaaactgaggacactactattgctgatatcgctgtcggtctgagagccggacaaatcaagaccggtgccccagctagatctgagagattggccaaactgaaccagatcttgagaattgaagaggaacttggagacaaggcaatttatgctggtaaaaacttccacaagtctgtcgccatctaa

SEQ ID NO: 3442 - DNA, 615 bp, Artificial Sequence
  Optimized genes for Pichia pastoris
atggcttctccatcttctaagatccaccacgttaccaacaagtctcgtgccaacttgagaactcaaaagagattggctgcctctattattggtgctggtaagaagaaagtttggttggacccaaacgaaactgagcaaattgctcaggctaactccagagaagctatcagaaagttgtacaaggacggtttgatcgtcaagaagccaccagttggtcactctagagcaagagccagagcttttgctgaagccaaacgtgcaggtagacacactggttacggtaaaagaaaaggtactgctaatgctagaatgtctacccaaactttgtggatgagaagactgagagttcttcgtcgtttgttggttaagtacagagacaacggtaagattgacaagactctttaccacaccttataccgtgagtccaagggtaacgctttcaagcacaagcgtgctttgattgagcacatcattcaagctaaggctgaggctgctcgtgaaaaggttttgaaggatgagtctgaagctagaagagccaagaacagagctcaaagagagagacgtcaacagagacaagccgagaagagagaggccttcttgaacgaggaggcttaa

SEQ ID NO: 3443 - DNA, 1161 bp, Artificial Sequence
  Optimized genes for Pichia pastoris
atgtccaagaacgcccaagtcgatgatttggctcacggtttggccggtgctggaggtggaatcttgtccatgattattacctatcctttgctgactctgtctacccacgctcagtcttccaaaactcaaaagccattggatggttccgttgatgagaaggaattggagccaaagaagtcttcaacctacggtaccctcaagcgtattctgaagaagcaaggtgttagaggactgtacaacggtttggaatctgcaattttgggtatcgctgtcaacaatttcatttattactacttctacgagcttactggtaacacattggagggactttccagaggtagaaagagaggttcaagagttggtggtctttctgctttccaatccattgttgctggtgccattgctggtgtcatctctagaattgctactaaccctatctgggttgccaacactcgtatgactgttctgagcagagaacaaagagacttgaagagagtcaatactttgcaagctattttgtacattttcaagaccgaaggtttcaagactcttttctccggtctgattccagccctgttcctggtcttgaatccaattatccactacactatttttgagcaattgaagactttattggtcaagacaagaaaaagagctttgactccacttgatgctctgttgttgggagccttcggtaagttgatttctactgtcattacttacccatacgttaccttgagaaccagaatgcacttgcagaacgctgagaatgctagaaactcttctggtgagtcttccgtctccaactccgccgttttgtctgccacttctgatgaagatttaggaaaggagggtgacaacgaaaagaagattgcccaggagcagccaaccaacaccatttggggtttatccaccaagatgttgaaagaggaaggtatttcctctttctattcaggtatgtctgttaaattgtctcaatctattctttccgctgcttttttgttctttttcaaagaagagttggtttctgcttctgacgttgccatcaaggctgttaagaaagttgactacaagtccttcttgaacaacccagctcaagttgttccagatctgaatcctgctccatctcctaacgctgacggttctccagtcgacatctaa

SEQ ID NO: 3444 - DNA, 621 bp, Artificial Sequence
  Optimized genes for Pichia pastoris
atgtctgttttcactccaattgaggatgctctgaaggcttacaagaacggtgagttccttattgtcatggacgatgaggaccgtgagaacgagggtgacttgattgttgctgctgaattgatcactactcaaaagatggctttcttggtcagatactcttctggttacgtttgtgttccattgtctaccaagagagccgctgagttggagcttccaccaatgatcaagaacagaactgatagacaaggtactgcctacactcacaccgttgatgccagagacggtaccaccactggtatctctgcttctgacagagctttgacttgtcaagttttggccaacccaagatctaagccagaggagttgatgagaccaggtcatatctgtccattaattgctagagaaggtttgttgaaggagagaagaggtcacactgaggctgccgttcaattgtgtgagctgactggattgcaaccagctggtgttattggtgaattggttagagatgaagatggttccatgatgagattggatgactgtgtccaattcggtctgagacacaacgtcaagatcatcaacttggaccaaattattgaatacatggattccaagaatagttga

SEQ ID NO: 3445 - DNA, 1683 bp, Artificial Sequence
  Optimized genes for Pichia pastoris
atggctgagatcactcttggtacctacattttcgagagattgaagcaaattgacgttaagactatttttggagttccaggtgacttcaacttggctctgctggatcatatttatgaggtcgaaggtatgagatgggctggtaatgctaatgaattgaatgccgcttacgctgctgacggatactctcgtgttaagtccatggctgccttgatcaccactttcggtgttggtgaactttctgctgtcaacggaattgccggttcatttgctgagcacgttggtctgttgcacattgtgggtgtcccagctatttcttctcaagagaagaagcttttgctgcaccacactctgggtaacggtgactttggtgttttcaagagagtcttcaaaaacgtttccaagtctgccaactttatcagtgacatcaacgaggctcaagatatgattgatggtgccattagagaggccttcatttaccaaagacctatctacttaggtttgccaaccaatcttgtggaaatgaaggttgacagaactagactgaacactccaatcgacctgaagccagttcctaacccagtcgaggcagaagaggaagctttgcaatctattctggagttgatatctaaagcctccaaacctgtaattcttgtcgatgcttgtgcctctagacacttctgtcagaaggaagttgatcaattgattgatgttactaacttccctgtttttgtcactcctatgggtaagggtggagtggatgagcaaaagcctcaattcggtggtgcctacgttggttctctgtctaaccctgatattactgagttcgttgaaaaggctgatttggttatctctgttggtgctttattgtctgatttcaatactggatctttctcttactcccactccaagaacattgttgagtttcactctgactacactcaaatcagatctgcagtgttccaaggagtgcaaatgaaagcattgcttcaaaaacttcttccattggtgggaaaggcttctaagcacatcactgcccaagtccctccaaagattgctccacctattgagaagggagcctccgaagacttgacccaagactggctttggtccaacatctcaaagttcttgagagctggagatgtcgttattactgaaactggtacttccgctttcggtattgtccaatccagattcccaactcacgtctctggtatctcccaagttttgtggggttccattggtttttctgtcggagctactttgggtgctgtttgtgctaccgaagaattggacccaaacagaagagtcatcttgttcgtcggtgatggatccttgcagttgactgttcaagaaatttccactatggccagatggaacctgaaaccatacttgtttattttgaacaacgacggttacaccatcgagcgtctgatccacggtgagaaagcttcctacaacgatatccaaccatgggaccacttgaagttgttggataccttcaaggccaagaactctgagtccaccagagtttctaccgttggagaactgaccaagctgttcaaggaccaaggtttcaacaagccagacaagatccgtgtcattgaaatcatgttggagaccatggatgccccaatttctttggtcaagcaggctgaaataactgctaagaccaacgctgcttaa

SEQ ID NO: 3446 - DNA, 909 bp, Artificial Sequence
  Optimized genes for Pichia pastoris
atgcacagaacttactctctgagatctggtagagctccaactgctgctgatgtcaacaacccaccacctcctacttctaccaccaagtctaagttctttggaaagaactctattgcctcttctttgagaaaaaatgccgctggtgctttcggtccagagctttccaagaagctggctcaattgatcaagattgagaagaacttggaaagatccatcgagttggttgccagagagagaagaaccgtcgccaagcagctgtcattgtggggtgaggagaacgatgacgatgtttctgacgttaccgacaagttgggtgttttgatttacgagattggtgagctggaagaccaattcgttgataagtacgatcaatacagaatcactttgaagtccattagaaatattgaatcttccgttcaaccatctcgtgacagaaagcaaaagattactgacgaaattgctcacttgaaatacaaggaccctcaatctccaaagatcccagttcttgagcaagaattggtcagagccgaggccgaatccctggttgctgaggctcagttgtccaacattacccgtgagaaactgaaagctgccttcaactaccaatttgacgctcttgctgaactttctgaaaaattggctttaatcgccggttacggtaaggctttgttggagttattggatgattccccagtcactccaggtgaaactagacctgcttacgacggatacgaagcttctaaacagatcatcattgatgctgagaatgctctgtcctcttggacccaagacaacgctgctgttagaccatccttgtctatcagaaactccgagtatgatgaagagccaaacgaggaatgggaagaaaaggaagaaggtgatgagaccagagacgagactcaagcttaa

SEQ ID NO: 3447 - DNA, 1974 bp, Artificial Sequence
  Optimized genes for Pichia pastoris
atgggtaagtccattggaatcgacttgggtaccacttactcttgtgttgctcattttgctaatgaccgtgttgaaatcatcgctaacgatcaaggtaacagaactactccatctttcgttgctttcactgacactgagcgtttgatcggagatgctgccaaaaaccaggcagctatgaaccctgccaacactgttttcgacgctaagcgtctgattggtagaaagtttgatgacccagaaactcaagctgacatcaagcactttccattcaaggttattaacaagggaggaaagcctaacattcaagtcgagttcaaaggtgaaaccaaggtgttctctccagaggagatctcttccatggttcttacaaagatgaaggatactgctgagcaatacttgggagagaaaatcaacgatgccgttgttactgtcccagcttacttcaatgattctcaacgtcaagctaccaaggatgctggtcttattgccggattgaatgtccagagaatcattaatgaaccaactgctgccgccattgcttacggtctggacaagaaggatgctggtcacggtgagcacaacatcttgatttttgaccttggtggtggaactttcgatgtctctcttttgtccatcgatgaaggtatcttcgaagtcaaggctactgccggtgatacccacttgggcggcgaggattttgacaatagattggtcaaccacttcattgctgaattcaagagaaagactaagaaagatctttcaactaaccaaagaagtttgagaagattgcgtaccgcttgtgagagagccaagagaactttgagttcctctgctcaaacttctatcgaaattgattcattgtttgagggtattgacttctacacttcaattaccagagctagattcgaggaactttgtgctgatttgttcagatctactattgagcctgttgagagagttctgaaggactccaagttggacaagtctcaggttcacgagattgttttggttggtggttctacaagaattcctaaagttcaaaagctggtttccgactttttcaacggtaaagagccaaacaagtcaatcaacccagatgaggctgtcgcctacggagctgctgttcaggctgctattctttccggtgacacctcttctaagacccaagatctgttgcttcttgatgttgcccctttgtctttgggtatcgagactgcaggtggtattatgactaaattgattccaagaaactctaccatcccagccaagaagtctgagattttctccacctacgccgataatcaaccaggtgttttaatccaagtttttgaaggagaacgtactagaaccaaagacaacaacttgctgggaaaatttgagttgtcaggtatccctcctgctcccagaggtgtccctcaaattgaggtcaccttcgacatggatgcaaatggaattttgaacgtttctgcagttgagaagggtactggtaagacacagaagatcactatcaccaacgacaaaggaagactgtccaaggaagatattgaaagaatggtctccgaggcagaaaagttcaaggacgaagacgagaaggaggccgaaagagtcgctgcaaagaatggtttggagtcttacgcttattccttgaagaactccgctgctgaatctggatttaaagataaggtcggtgaggacgatttggctaaactgaacaaatctgtcgaagagaccatttcttggttggatgagtcccaatctgcctccactgatgaatacaaggacagacaaaaagaattggaagaagttgccaatccaatcatgtctaaattctatggtgccgctggtggtgcacctggaggtgctccaggtggattcccaggtggtttccctggcggtgctggagcagcaggaggagccccaggaggtgctgctcctggtggagactctggtccaaccgttgaagaggttgactaa

SEQ ID NO: 3448 - DNA, 1479 bp, Artificial Sequence
  Optimized genes for Pichia pastoris
atggtcgaagctactggtgatatcggtttgattggtttggccgttatgggtcaaaacctgattttgaatgctgctgatcatggattcaccgttgttgcctacaacagaactgttcagaaggttgaccactttttggctaacgaagcaaagggaaagtctatcattggagctcactccattgaagagttggtggctaatctgaagagaccaagaagaattataattttagtcaaggctggtaaccctgttgatgctttcattcaacaattgttgccacacttggaccaaggtgatattatcattgatggaggtaactctcacttcccagacaccaaccgtcgttacgaggaattgaagcaaaaaggtatccatttcgttggttctggtgtttccggtggtgaagaaggtgccagatacggtccttctctgatgccaggtggtgctaaagaggcttggccacatattaaggaaattttccaatctattgccgctaagactgatggtgagccatgttgtgattgggttggagatgccggtgctggtcactacgttaagatggttcacaatggaattgagtatggtgacatgcaactgatctgtgaggcatatgatctgctgaaaagagttgctcgtcttcctgactctgaaatctccaaggtctttgccaaatggaacaagggtgtccttgattctttcttggttgagattaccagagacattcttgcttacaatgatgatgacggtaagccattggtcgagaaaatcttggattccgctggacaaaagggtactggaaaatggactgccatcaacgccctggatcttggtatgcctgtcactcttatcggagaggctgtttttgctagatgtttgtctgccatcaaggatgagagagtcagagcttccaagattctgtctggaccatctgttccagaaaatgccattactgacaaggccaagtttattgacgacttggagcaagctttgtacgcctctaagatcatctcttacgctcagggtttccagttgatcagagaagctgccaaggagtacaagtgggatttgaacttcccttcaattgctttgatgtggagaggtggatgtattattagatccgttttcctgggtgagatcactgctgcttatagagagaacccagatttggaaaaccttttgttccacccattcttcaacaacgctatttctaaagctcaatccggatggagagccactttgggtaaggctatcgagtttggtattccaactccagctttttctaccgctctttccttctacgatggttacagatctgagaagttgcctgccaacttgttgcaagcccaaagagattactttggagcccacactttcaaggttcttccagaggaggccaatgaaagattgaaagtcggtgactggattcacattaactggaccggtaaaggaggaaacgtttctgcttctacttacgacgcttaa

SEQ ID NO: 3449 - DNA, 840 bp, Artificial Sequence
  Optimized genes for Pichia pastoris
atgggtcaattgttcagaaagatcattcaatggattccattgttgttttttgccggttccgttcttttgcaattctttgttattttgtctggtgctagaaccactggtgttttgaaggatttctactggttagaagttgaaggtacaggagctattgacccacaatttggaactaccagatggactaactacagaatgtgtaattgggaaaacgatgagttgtccaactgtgagggtcctcaacctgcttatccattctctccagacaacaacttttctgatggtgagaacagagctttgatcccatctgacttcatcaaccacagagacacttactactatttgtccagagttggatggtccatgttgttggttggtcttgtgttcactgttttctcatttttctccactttgttgagaatttttttgaaatggaagttggtctccggtttgaactggttgaattctgtttttgctgtcttcttcgttgctttgggtgcctccttgatgactgctgcttacgttaagggtagaaactctttcaacgacgcttccgagtttgatgcttctcttggtgtcaagatgttcgctttcttgtggacctctttggctctgttgctgctgtcattgccaattttctgtttcaagaagccattatcttccttccacggtggtaccggtactgcctctcacgatgactccattgagtacaaggaagattacattcctccagccactggagatgcctacaacccagagccagctggtgactacccaccaactcaaaagagaaaactgaacttcttcaagattaaccgtaagactactattgaagactaa

SEQ ID NO: 3450 - DNA, 660 bp, Artificial Sequence
  Optimized genes for Pichia pastoris
atgtccaagtctgctctgttgatcattgacttgcaaaacgacttcttggaaggtggttcacttgctgttccagatggtaacgaaattatcgacccaattattgagctggctcaaaagaaagattgggatttggttattgctaccaaggactggcatccacaagatcatacttcttttgcttccaaccatggtgtcaagccatacactgaattggagttcaccaacccagaaaacgaggctgaaaagaagattcaagttgtttggccagaccactgtgttcagaactccaatggttccgaattcccacctaagttcaaggctttctgggaacaattcactggtccaaaggaactggttaagaagggatacttgtctgacagagaatactactctgccttctccgatgtctggaagttgcacaagactgagttggactccttgttgaagggtcacggtatcagaaacgttaccattgttggtttggccttggatttctgtgtcttccacactgcttctgatgctttgagagagaactactccgttactttggtcactaacttgaccagatctgttgctgaccgtgagggtcctccatctaagctgcaatctttgggtgctcacttggctgagtacaacggttctgagattatcatcaaataa

SEQ ID NO: 3451 - DNA, 858 bp, Artificial Sequence
  Optimized genes for Pichia pastoris
atgtccagattgattgttgctttgcacactgttttgaagagattcaaggaaatgggtctgttcactgactccgacaaagacaactctgacaagctgtccgagtcttcgtcctccacttcatccaattggttggacagatacctttccattgccagagaggctaagcattcattggcttctaagatcgaggatgtcgctcttccaggtgaagatggtactttgttcaataagaacattgacactaacagaccagattcaattttcagagctgttttcggtgatgactttgaaactactttcaacaaggttgactctttggtcaacgctattgctccagtttttgaccaagatgtttggtctgaattgtttactggttccaaattggtttcttccaagtacggtttgtgggcttacccaattccatctcatcagttgtacaaggactgtaactcaaagcaaggtctttctgtctgggatgagcacggttactggagatgtcttttcccaaaggctcaattgccagagaactacaaatctattgattccaacattatttctaaagaagacgttgagcaagacgattctcacaagttgggtagatttttcaccaacttctctgattacttgaactggagatctgttatggaagaaaacatcaagaaacaaagagtctctttctccaagcctcaaaagtcttctggttcttcaacttcttactctgagagaactttaccaaacggtgagattgaaaagattgagaagaagcacgaatggttcgttgatggaactgaaagatccaaggagaccaagactatcattcatccagacggttcagttaccactgagaatatcaaataa

SEQ ID NO: 3452 - DNA, 909 bp, Artificial Sequence
  Optimized genes for Pichia pastoris
atggccgttgtcactttgaagaacgccatcttgtctctgttcccagccaacacttctgactcccagaatgagccattgctgggtgaggattctaccggtaacgctggatacgctgccagagatgttcaaggtctggaatctgagattgagtctaactccaccaagactcaaaacatctctgaggacaaccagaaccaaaccgttctttggggtttgtttgagaaggttgacccaagagtcatgtccgacatcattattggtctttctgatggtctcactgttccatttgctcttactgcaggtttatcttctttgggtgactctaagttggtcatcactggaggaatggctgagctggtttctggttctatttccatgggtctaggtggtttcttggccgctagatctgaatccgagttctacaagtcccaagttagaaaggaaaagcaattgttcttcaacaacaaggagttgttggaggaggaattggaagacatttttttggatatcggtatgtctgaaactaccactgagtccgcaattagagacttgtccaagtctccaaaggctatgattgatttcattatcagacacggtaagggtttagaagaaccagctgatggaagacaagtcacctctgctttgactattggactgtcttacttccttggtggatttgttcctttggtcccatactttttcactgctattgtccaaactggtttgatcatctccgttttggtgatgggagttactcttttctggttcggttacttgaaaactgccatttctatgggtgaagattgttccttgtggatgagagtttccgaaggtttgcaaatggttctgatcggatccattgctgctggttccgcttggggattggttcgtgttattgacaccaactaa

SEQ ID NO: 3453 - DNA, 1890 bp, Artificial Sequence
  Optimized genes for Pichia pastoris
atgacagtcgaaactaaccaatttacttacttgcaaggttccactttcgacaagaagatgaccaccttgtccttgaagcaaactgcttacgaatttgttgagggtatgactggtgactaccactacttaaagaatcttgatgcttcagactccaaccttagatacctcaaagattactctttcccaactcttcaagagttgaatctgtcaaatttgtcttacctgaagaagctggtttccgacggtgatcaattatctggtcttgagaaattgaccgccgatggttctaacattgagcttattgatatcaagggagatgtcttggcttccatttcttgttctaataccaaggaattgaaagctattaagggtgagctgccagctatcaactacatttacgctgataattcttctttagaatccgtttctttgttgccttacgaggatgaaaagtttcaattcaaaagaatgttcttcttgtacttggtcaattgtccaaacttgatctcattccaacgtggacaatacccaaagttgcgtactgttgacctttcgaattccaccattcaagttttgcactcttcccttatcaagcatttgggtgctctttatttgggaaacgctactatcaaagagttcgtcatcgacgataacgacaatgaagacgagttgactctaagacaactcaagactttgaacctgagtaactccagaattcctaccaacatgactgacttccttctgagacacattttcagaaagaagtctaacccatgggacaaagaatggtcttcactgatctggcaatccgtcaacaccgaccaagaagtccaggaggttcaatcttttatcaagagaatccctcaattgaagaaactggatatctctaactcatcaaaggccaacagtctgttgagtaatttggtttctgatattccagaattctggaactccttagaggacttggatgttttcaattcaaacactgagggtttcaacttttccaactctaaatctttgattcatctgggatgttccgatccagatgccaccgttctgaaagttgatgacatgcctgctttgaaggctttagatgtgcttggtccttccaatattgaaaccgtcaaactttctaactgtatcagattggagaaggtcgactttacaggttgttacgcccttaagcgttttgagtctgactctctttcattgttacaactgaagttctccaacaactcgctggagacctggtccctgaatgattcttctattagatccatcactctggaaaacaatactggattccgtcgtttggaaggtaacttccctaacttggagactttggacatctccaactctgctgttgaagttattaacatccacgatggatctaagcttaaaaagttgtcaattttgagaaccagatctgtcgaggagatccaaattgacaacttgtctactttacaggaacttcgttacgacactaaggatgagaagaacacaaaggctgtcaaggagtttgctgacaagattctttccaagagagagccatccttcactgccaaggttttgcaaagagtcagattcgagcacagaggtttgttcaccggtggttttagatttttcgatagaagaactgaagaactggtctgttgtttcaaggacatcaacatttccgagaacaagatcaatgccaaatgtggtatctgtgaagagaactatgaggaaggtcaaaagtgtcagattctgtactgtaagcacgctttccacactgattgtgttgagcaaatgttgcagatgggtaatgacagatgtcgtcactgtaacgatgagattgacattgcttctgttggtctgtctagtgacccattgccattcagatggttgtaa

SEQ ID NO: 3454 - DNA, 1812 bp, Artificial Sequence
  Optimized genes for Pichia pastoris
atgtcttccattttcatttcctttttcaagcttgtgcaattgagattccgttattactggaacgttttggcttccttcttccctctgctgactttgctgtcagatggtttgaaccatgttcttccaccaactcgtaagatttcttcagactctgaagagtctcacgagctggatgacaagaagtccttgtttcctgaatcacagcaacgtatcactcaaatcaaggttttcaaaaatgttcatccttgctctcttactttcaacaccaagctggttccttttaagaactccaatggtgaaatggaatggaagtttgttgaagacaacgagtctgctgagaaatctccatctttgatggaggatggactttccgaaagtctttctcctttcatggctgactcaactcaggattctgatgttcacctgatgttcggtactccattcttggttaaggaggaacaacaacagcacaaacaagagcagcaacaactgcaagagcaagaacaggagcaccaacatcagcagcatcaacagaacttgccttcctcctctaattccaaggacggttctcaagaccactcttcccttgctgaatcttctaaggaattgaacattcacaagcgtaaccgtagaaagagagtctctagtgttgtcacttccgtcaccaatggagagacctactaccactgttctgagtgtccctccaaattcaagttcagaggttacttgactagacattcaaagaagcactcacaaagaaaagcttaccattgtccattctacgagtcaggccacggtaaatgttccctgggtgaaggtttctccagaagagacacttacaaggtccacttgaaggctatgcatttcaagtacccaaaaggtgtcaagtgtgctgatcgtactggtatgatgggatggtgtggatcttgtggtcaatctttccaaaacaatgaaatttgggttgagagacacattgagaagggtgtttgcagaggattgccagagggatactcttcaagaatcatgaccagaaacagaaagaaaaccggtaagcaatcatcattactgaacgtcgccaacaacggagtcaacgaaaaccctatgttgaaattggtcatggatggtgaagttgtttccgctccaaagttggaagatgtcactcatttgttgggtgagtccggttctaccaacacttggactgagaacagtgagaacgcttctagaacttcatctattcatgacttgagtgatcattcttctgcctctgactctctgtctggtcacacttctggagaatccctagctggttccactaacgattcatcctcgcagtctttggatgaggctatcaacccaattggacacccagttgacagatctttatttgctcatccaaactctaacggtgagatgtttggaagatcatggaccgctagagagagttcattgcactccgtcgttgatccatttggtggtcaagttcaagcccaagtccaagctcaaatttacatgaagtctcaggccgattcccaggtctcccaatccgactcccaaaagcaggttaacttccagaccaactttcaacagattcctcaaaattttgaaaattctgttccattggccatgcctattggtgacgatgatttcccagctttggacggagagaatgcctacattgctctgttgcaacaacacagacaacttcctgatagtagaccagaaagagctaagcctgctcacttgggacaagatcctttgttccaccctaacatgcacgtttcttggttgtctcaaccagatttgaccttttag

SEQ ID NO: 3455 - DNA, 1089 bp, Artificial Sequence
  Optimized genes for Pichia pastoris
atgcttaaattgtatgctattagacctattagaccaattaaaccttgcttggttgcctctactttcagacattactctgtcaaggttgacacttctaacaaggctgatgttatcaaggattcccagactgatactacttccaagcctggtgctgagcacggtcacaccttgggtcaatacattaccaagaagctgatggttagacaaagattgccaactgaaaagcgtgatgactctttcttgactccaccagctatgccacaccacggatacagacaggatttgatggagaagatccactacgagcatagagagccaaccttgatcagagacaaacttgctttcggtttgatgagatctttgagagtctgtttcgacttcttttctggttacaagcatccaaagactaaggaaggtttagagaagcttactcctgctacctaccaaatgaccccagaaaaatggttgaccagattcattattttggagtccattgctggtgtcccaggttccgttgcttccttccttcgtcatttgcaatctctgagacttctgaagagagacaaggcatttattcaaactttgcaggacgaagcttacaacgagagaatgcacctgctgacctttttggagattggtaagccaggaccattcatgaaggtcttgttgtacgcttctcaaggtgttttctgtaacctttttttcttcacttacatgttggctccaaacgcttgtcacagatttgttggttatctggaagaagaggctgtttacacttacaccacttgtttggaagatattgagagaggtcttcttccagacattgaacacttcaaggttcctaagattgccaaggactactggcacttgtctgaggatgctaagatgcgtgacttgatttcttacatcagagccgatgaagcaaagcacagagaagttaaccacacttttgccaacttgaagttggatggtactgacagaaacccatttgctttgcaagttgattctgttccagagtctgctcaacctaacaacagactgtccactcacaaggccgttggatgggaaagagatgagctggttttgtaa

SEQ ID NO: 3456 - DNA, 1683 bp, Artificial Sequence
  Optimized genes for Pichia pastoris
atgccatctcttttgcaagaagataatgccactttcaagttggcttctgaacttccagcctttgaagaactgaaagagttgtacaagtctaaaggtaaaaacttctctgctaagcaggctttccagaaagatcctgccagatcttccaaattctcacacacttttaagaattttgatggaacagaagtcttctttgacttttccaagaacttgattgatgatgagattttagctaagctttttgacttggctagacaagctaatgtcgagaagctgagaaatgaaatgtttgctggtgagcacattaacgtcactgaagacagagccgttttccatgttgcattgagaaacagagctaacagaccaatgtacgttgatggtaagaacgttgctccagaggttgactccgttttgcaacacatgaaggagttctccactcaagtcagagacggtacttggaagggttacaccggaaagcaaatcactgatgttgtcaacatcggtatcggaggttctgacctgggtcctgtcatggttaccgaggccttgaaaccatacgcccaagagggtttgcacgttcattttgtttctaacgtcgatggtacccacatcgctgagaccttgaagtacttggacccagaatctactttatttttgattgcttccaagaccttcactactgctgaaactatcagaaacgcaaacactgccaaggactggttcttatcaaaaactggtaacaagtccgaggctatcgccaagcactttgccgctttgtccaccaacgctgaggaagttgcaaagtttggtattgacactaagaacatgttcggtttcgagaactgggttggtggtagatactctgtctggtctgctattggtctgtcagttgccatttacattggattcgacaactttgaggatttcctgaagggagctgaagctgtcgaccgtcacttcttggagactccattggaacaaaacattccagttattggtggattgctgtctgtttggtacactaatttcttcggatctcaaactcacttggttactcctttcgaccaatacatgcacagattcccagcttacctgcaacaactgtccatggaatccaacggtaaatccgtcaccaagggtaatgtgttcgccaactactcaactggaccagtcgtctttggagagccaactactaacgcccagcactcctttttccaattggtccatcaaggaactcatttgattcctgctgacttcattttggccgccaaatctcacaaccctgttgccaacaacgctcaccaaattcttctggcttcaaacttccttgctcaggccgagtctttgttgcttggtaagactgaggaagaggtcgctgctgccggtgctaccggtggtcttatcccacacaaggttttttctggaaaccgtccaaccacttctatcttgactcagaagattaccccagctactttgggatccctgattgcctactacgaacacgtcacattcaccgaaggtgccatctggaacatcaactctttcgatcaatggggtgttgaattgggtaaggtcttggcaaaagctgttcaaaaggatttgcaggatgactctgccaatgttgaggagtcccacgattcttctaccgctcaattgatcaagaagttcaaggcttgggcttaa

SEQ ID NO: 3457 - DNA, 768 bp, Artificial Sequence
  Optimized genes for Pichia pastoris
atggctttgaccaagaaaccagttatcaagccaattttcatttccaacttggaccaaattgagaaagtcgagaaggttgaaaagaccagagaacaagccttgaatgacattcgtgaaaaactgaagtcaaacaagttgaaacaagaagagaaggctagagaggagaaggaaaagcaagctactgttatgtcatggtctccttcccctattgttgccaagaagtcctcatcttggggttcccaatcatccggttcttcaggatctggaactgaatctccagctatcagagatttcagaagaaagcaatctcgtgagttgttcggtgacttcaagctgaacattccattgaagcagtctaaatctgctcaatccattatggttttgaactccgacaactcaagtaactcttccaagagaccatctttcaacaagggtagatctgagtctgtcttgcaattcactgcttctaacaacaaacttgactctatctggttgcacaagatgactactatctccagacaacactctgttgtttcctctttggatggtcaagatccaaacgaagaagatgatatcatggaggatgttgagcaattccacgttgtctctggtaccaccactccattagatattccttcttcttgtcaccactccccaggtgattctgaatacttggacgatgctgattttgttgctgtttctccaaagtctcaaccaccatccatgtctgacttggctgactactacaaccagaaccaatttttgtaa

SEQ ID NO: 3458 - DNA, 1074 bp, Artificial Sequence
  Optimized genes for Pichia pastoris
atggattcaattttgaccaacagatgtttgacaccagtttctaaccatgaaactttcaacctggttggtggttctaagtctcttacttctgctgagactagaaagaactccgatgagcgttcttcaatctccattccttctcctcctttgtccccataccaaagatctttggacgttgagagagaccacaagatttttgatgttgtcggtagatccaacgatcaaattgttggtgattttgaagagccagccaccaagactcaaactgagcaattggaggaaggtaagccagacgatgctccaaagatttcttcctctgttttgttgtcaaaccaaaccttcccaatcaaggacttgactaacgccaagctgactgttaacgcttgggcttctatcaactctggtgactcttctttcaaggagaaccagttggtgttccttgattcttactacaacattattgacactagaaagaagagagccccaagaagaaaatacccaactgctcaacctagacgtcgtgttttcttctctgcctctgagtctgaaacccctaacgaaagagtcagaaccagaagagttatcagagataacgtcaagtactccgactacgagtccgaagttgaaatttcaagaccatccactcctaagcgttccaccaaacgtgtctccaaaccatctactccacagcctcaattctactcagactatgaatctattccagattactctccacctctgtctaccttgcctccaaacaacactaaggctttgaaggccgaatggaagggtcaaccaatgaacttgtctgatgatccattggtcggaaagttgcacccagctgaagtcactttggcttccgtcttgagacttccatgtaacgtttacttggactccaagagaaggttgttctccgagaaggtttccagatttagattgggtttgccattcagaagaactgatgcccaaaaggcttgtaagatcgatgtcaacaaggcatctcgtttgtttgctgctttcgagaaagttggatggttggatgactaccacttccgtaagttcttggacatgtaa

SEQ ID NO: 3459 - DNA, 1335 bp, Artificial Sequence
  Optimized genes for Pichia pastoris
atggttaagcaagtgcttttgttgggttccggttttgttgctaagcctaccgttgacattttgtctgccaacaaagatattgaggttactgtcgcttgtcgtactttggagaaagccaaagaacttgctggttctgttgccaaggccatttctttggatgttaccgatgaagctgcccttgatgctgctgtctctcaagtcgacttggtcatttccttgattccatatatttaccacgctaccgtcgtcaagtctgccatcaagaacaagaagaacgttgtcactacttcttacattaaccctcaattgaaagctctggaacaacaaatcaaggatgcaggaattgttgttatgaacgaaattggtcttgacccaggtattgaccacttgtatgctgtgaagactattgatgaggtccacagagctggaggaaagattaagtcctttttgtcatactgtggtggtttgccatctcctgaggactctgacaatcctcttggatacaagttttcttggtcttctcgtggtgttctgctggctttgaccaaccaagctaaatactggaaagacggtaagatcgaggaagtttcctctgaggagctgatggcttctgcaaagccatacttcatctaccctggatttgctttcgtctgttacccaaacagagattctaccacttacaaagagttgtacaacattcctgaagctgagactgttatcagaggaactttgagattccaaggtttcccagagtttgtcaaggttttagttgatctgggattcctgaaggaagatgccaatgagattttctctaaaccaattgcttggaaggacgccttggctcaatacatcggtgctccatcctcttccgaggctgatttggtttctactatcgcttccaaggctactttcaagaatgaagctgaccagcaaagaatcatcaatggtctgagatggttgggattgttctccgacaacgctatcaccccaagaggtaacccattggacactctgtgtgccactttggaagaattgatgcaatttgaagagcacgagagagacctggtttgtttgcaacacaagttcggtattgaatgggccgatggatcttctgaaaccagaacttccactttagtcgagtatggtgatccaaagggttactctgctatggccaagttggttggtgtcccatgtgctgttgccgttgagcaagttttggatggtactctttcaactcctggtttgtgggctcctatgactccagaaatcaacaaccctttgatgaagacattgaaggagaagtacggtatcttcttgactgaaaagaccttgtaa

SEQ ID NO: 3460 - DNA, 1152 bp, Artificial Sequence
  Optimized genes for Pichia pastoris
atgacctctaaccgtcctttgccactttttgcctctgccgatgttcaaaagcacgtttctccaaaggactgttgggttaccttgtaccatagaaaggtttacaacgtcactgagttcttagaagaacatccagccggtgatgacttgattttggaatacgctggaaaagatatcactcaaatcatgggtgaccaactgtctcacattcactccgagtctgcttacgaaatgttggacgaggacatgcttgttggttatttggctactccagaggaagagagagagctgctttccaacaaggatcatgaagttgaagtccaattggattctaaaggtaacgttgttgaggttgacattgacttgactgaatttggtgagttaccagctgaaggtcttttgtctttgaaaactgactacgagcatgacttggtcaagcatcaattccttgatttgaacagaccattattgatgcaagttttgagaggttcttggactaaggagttttacctggaccaggttcacagacctagacattatggtaagggttccgctccactgttcggaaactttttggagccattgtccatgactgcttggtggattgttccaatggtttggcttccagtcaacttctacttcttctatattggtttcaccaaccagaacaaactggttgctatggccttttggttgctgggtttgtttgtctggaccttcctggaatatgctttgcatagattcctattccacctggattactatcttcctgaaaaccaaattgctttcactatccacttcttgttgcacggtattcatcattacttgcctatggacaaatacagattggttatgccaccaactttgttcattgtcttgtgttacccaatcaagaccttagttttctctgttctgccatactacatggcttgttctggttttgctggtggtttcttgggttacattatgtacgacgtcacccactacgttcttcatcactctaagttgccaagatactttcaagagttgaagaagtaccacttggagcaccactacaagaactatgaattgggattcggtgttacttccaagttctgggacaaggtctttggaacttaccttggtcctgatgatgtctaccagaagactaactaa

SEQ ID NO: 3461 - DNA, 1086 bp, Artificial Sequence
  Optimized genes for Pichia pastoris
atgactccaagatctcacatctttttcgacatttccatcaacaaccaaccagccggtagaattatttttgaattgttcaacgatattgttccaaagactgctgagaacttcagagctctttctaccggtgaaaaaggtattggtaagtctggtaagccattgcactacaagggatctactttccacagaatcatcaaggacttcatggttcaaggtggagattttaccaatggtaacggtactggtggtgagtctatctacggtgagaagtttgaagatgagaattttcaattgacccacgataagcctttcttgctgtccatggctaacgctggtcctggtaccaacggatcccaattctttatcaccactgtcccaactcctcacttggacaacaagcacgttgtcttcggtaaagttattgctggaaaggctaccgtcagaaagattgagagaaactctgagggagaggctccaattgagccagttgttatcgaggactgtggtgaattgccagaggatgccgatttgactatttcagacgagactggagacaagtatgaagaagttctgaaggacaatgaaaacattgacatcgatgactttgagcaagtttaccaggccattactgagattaaggagctgggaaccaagtacttcaagaacggtgacactaagatcgctttcgagaagtaccaaaaggctgccaactacttgttggagtacattccatctgacttgtccgaggaacaatcttccaagttggaacttttgaaaacttctgttttctccaacgttgctttggctggtttgaaggtttccaagttcaaagataccatcaaatacgctactttggtcattgaagacgaatctgctgatgctaaggccaaatctaagggttactacagaagaggttccgcttactcttctttgaaggatgaagactctgccatctctgatttccaaaaagctttagagttgtctccaggtgatccagctatttctcaatccttgcaaagaactaccaaagccagaaaagacagattggccaaggaaaaggctgctctgtctaaattcttcgaatag

SEQ ID NO: 3462 - DNA, 1641 bp, Artificial Sequence
  Optimized genes for Pichia pastoris
atgttgagtgctagacccgttatcagaagagctgctcgttctgctgtcgccatcaatgtcgcaagatctgttccaagagttgtcagaccattggtctccaggggttacgccgctgctaaggccgctccaactgaggtttcttccattttggaagagaagattagaggtgtgtctgctgaggctgatttgaatgagactggtcgtgttctttcagttggtgatggaattgccagagttttcggtttgaacaactgtcaagctgaagaacttgttgagttctcttctggtgttaagggtatggctttgaacttggaaccaggtcaggtcggtattgttttgtttggttctgatagaggagtgaaggaaggtgacactgtcaaaagaactggaaagatcgtcgacgtcccagtgggtcctgaactgctgggtagagtcatcgatgcccttggtaacccaattgatggtaaaggtccaatcaactctaaggttacttctcgtgctcaattgaaagctcctggtatcttgcctagaacctctgtgtttgagccaatgcaaaccggtcttaaatccgttgacgccttggttcctgttggacgtggtcaaagagaattgatcattggtgacagacaaacaggtaagactgccgttgccttggatactattctgaaccaaaagagatggaacaatggttccgacgagtctaagaagctgtactgtgtttacgttgcagttggccaaaaacgttccactgttgcccagctggttcaaactcttgaacaaaacgatgctctgaagtactctattattgtcgctgccaccgcctctgaagctgctccattgcaatacttggccccattcactgcttgtgctgttggtgaatggttcagagacaacggtaagcacgctcttatcatctacgacgatctgtccaagcaggctgtagcttacagacagttgtctttgcttttgagaagacctccaggaagagaggcttatcctggagatgtcttctatttgcactccagattgttggagcgtgccgccaagatgtctgacaagttgggtggaggttcattgactgcattgccagttattgaaactcaaggtggtgatgtttccgcctacattccaaccaacgtcatttctatcactgacggacaaattttcttggaggccgagttgttctacaagggaatccgtccagctattaacgttggtttatccgtctctagagtcggatccgctgcccaagtcaaggctatgaagcaggttgctggatctcttaagcttttccttgctcagtaccgtgaagttgctgcatttgctcaatttggatcagacttggacgcttctaccaagcaaactttgaacagaggtgagagattgacccaattgctgaaacagaagcaatatgctcctcttgccgcagaggagcaagttccagtcatttacgctggtgtcaacggtttcctggactctgtccctttggaaagaatcggtcaattcgaggaagagtttttggcttacttaaagtccaacgagaccgaggtcctggaagccattcgtgtcaagggccagctttccgatgagctgttggccaaattgaagtctgccactgaatctttcgttgctactttttag

SEQ ID NO: 3463 - DNA, 1212 bp, Artificial Sequence
  Optimized genes for Pichia pastoris
atgtctgaaggtattattgaaattgacaccaacttgatcgagaccaattatgaccaagttgtttctactttcgatgagctgaacctgaaagaacaaatattgagagctgtctttgcttacggttacgaattcccatctgcaattcaatctagagccatccttccaattgttgctggtcgtgacgttctggctcaagcccaatccggtactggtaagactgccacttttgccatttctgcccttcaaagattggatgaaaagttgaaggctgctcaggttcttattcttgctccaactagagagttagctttgcaaatcaagaaggttgtcttggccttgggtatgcacttgaacatttccgttcatgcttgtattggtggagttgacccagctctggatgtcaaagctttcaactctggtgttcaaattgtcgtcggaactccaggtagagtccaagatatgattgagcgtggtgcttttagaactgaaaacgttaagatggttattttggacgaggctgacgaaatgttgtccactggattcaaggaacagatctacactcttttcacccttttgccttccaccactcaggtcgttttgttgtctgctaccatgcctcaagaagtattggaagtcaccaccaagttcatgaacaacccaatcagaattctggtcaagaaagatcaattgactttggagggaattaagcaattttacgttgatgttggtgaggagcaatacaagtttgactgtttgtgtgatttgtacgactctatctctgttactcaagctgttatcttctgtaacaccagaagaaaagttgaagagttgaccgaaagactgactgctcaaaagttcactgtttccgctatccactctgagctttctcaaactgagagagacactatcatgcaagagttcagaaccggttcttccagaatcttgatttcaactgatctgttggctagaggtatcgatgtgcaacaagtctctttggtcatcaactatgatcttccttctaacaaggagaactacattcacagaattggaagaggtggtagattcggtagaaagggtgtcgctattaacttcgtcacttccaaggatgttgagatgatgaaggagattgagaagttctactctacccaaattgatgaattgccatcctccatcactgacttgtttgaaactgaagaagttaacgagtcttga

SEQ ID NO: 3464 - DNA, 801 bp, Artificial Sequence
  Optimized genes for Pichia pastoris
atgttgctgggtttccagagattcccaaaattccacaccttgaccagaaagtccccaatcaactccattagatctttgagatacaagtttcaaagacctttgttgactccattgttcttgtcaccaattatcaagcaatccatgaacctggttactatttcagactctatcagagagaacttgattaagcatgaagttattccagatgttatcaaggataaatctttcgttccaaagggtttattgatcatttcttacggttctccagacaaggaggttgttcttggtaacactttgaaggttgaagacgctcaatctattcctaagatcactttcaccgtcaatttgaacgaagagcaagagattgcttcttttttcgacgagaagttcactttggtcgtcactgatcctgatgctccatccagaactgacaacaaatggtctgagttctgtcactacgttgtctccgacttgtctctgtctaccaagtctggaactaccgacgctgaagatcaagtcaactttaccaccgatttgaaagttgacactatcccagagtctgattccaagactttggttccttacttgggtccaggaccacctccaaagaccggtttgcacagatatgttttcctgttgtacaaacaaaagccaggtgtttccttggaaggtcctgaccctaaaaacagaccaaactggggtactggtatccctggttccggtgtctctgactgggctgctaagaactctctttcccttttggctgttaacttcttctttgctcagaacaaggacaattag

SEQ ID NO: 3465 - DNA, 1038 bp, Artificial Sequence
  Optimized genes for Pichia pastoris
atgaccctttctcttttgctgagatctactaacattttcagagccccaactgccattgagactcaaactcagaccactcctgccttcactgagccacaagttctgaaactgaagcaaaacgtcagaaacccagactctttggtcgccaatgctgtcactccagctttcgactggaacacttttgagtttgctccaattagagagtccactgtttccagagctatgactaagcgttactttgccgatctggacaagtacgctgagtctgatgttgtcattgttggtgctggttctgccggtttatcagccgcctacactcttggtaaggctagacctgacttgaagattgctattattgaatctaacgttgccgttggaggaggttgtttcttgggtggtcaattgttctctgcaatggttttgagaaaacctgctcacttgtttttgaacgatttgggattggagtacgaagatgaaggtgactacgttgttgtcaagcacgctgcttacttcattactactttgtgttccaaggttttggctcttccaaatgttaagttgttcaacgccactgctgttgaagacctgttgaccagaaaggacgagaacggtcagatcagaatcgctggagtcgtcaccaactggactttagttaccatgcaccaccatgaccaatcttgtatggacccaaacaccatcaacgctaatgtcgttctttccgctactggtcacgatggaccatttggtgcattctgtatcaagagaggtgttgagattggtgctgtaaagaagatggatggtatgagaggattggacatgaacaaggccgaggatgctgttgtcaagggagcttctgaaattgccccaggtttggttgttgccggaatggaagttgctgaacactccggttccaacagaatgggtcctactttcggtgccatggctttgtctggtgtcaaagctgccgaagaggttttaaaggtctttgatgagagaaagaaacagaaccaacaatgttacggtggtctgtctgcttaa

SEQ ID NO: 3466 - DNA, 4503 bp, Artificial Sequence
  Optimized genes for Pichia pastoris
atgtacaacccatacggtaacggaggatacggaaacggtatcccccagtttcaacagaatgtctaccaaggccaacaacaaccgcaacaacagccacagcaacaggctcagcagcaagctcaattccagcagcctcagcccacaggattccagccatcgtcgtccttcggtgttggtttggtggcccagcaaactggtatccaaccccaaggtcttcagaacaacccagctatgttccaacaacaacaatttcagccaggattgcaatctcagcaaacaggatttaacgcacaagttattcagtctcaaccaactgggtactcacaacctacatcatctgctgcacctacccaaaaaggtcatgaactcaagatcccagcaatcagactttcattcatcactcagcaagatcaagagaagtttgagcagttgttcaagtcttcagtcccacctggagagaatgccatcgacggatccactgccagagacattttattgagatccaacattccaagttcgcaacttgccgagatctggactctgtctgacactacgaggtccggtaagttactgttcccagagtttgctttagccttgcacttgtgtaacgttgttttaagaggtgagaaccttccattcgagttgccaaccactttgaagaatgaagtatcttcgtttgttgatgtcatttcatttggtgtgggagaagaagacgacacacagaacaacaatacaccattctctaatgatttgttgtctagtgcccagacctcacagcagaaccaacagaaccaacctctttcttttcaacagacaggcttccaatcttcaaatcaagttcctcaactacctcagacttcctttggtaacattggtattcaatcccaaccaaccggtctccagcctgtgcctgcacagaagaccggatcgttggtcccagtggtcactggtggactttccgctcaacaaacgggtttcagaccattgcagtctcagtcaactggctatcagccacctctgcagaatcaaactaccggttaccaattgcctttgcaaaaccagaccaccggctaccagccccctttgcaaaatcagactactggttaccaacctccacttcaaaaccagaccactggttaccaacaaccattgcagaaccaaaccaccggttaccaggcaccattgcaaagtcaaaccacaggttacaaacctttgcaagctcagactacaggtttccaaccgccgttgcaaaaccaaaccactggctaccagcagccactgcaatcccaaaacaccggtttccaacagccattacaatcacaaactactggatatcagccgcttcaaagccaaacaaccggttatcaacaaccactacaatcccaattgaccggatttcaacagtctcttcagtcgcagcctactggtctgcaacctatgccaactggtaagccaggtcaatggggattcgttgcaactccaacaggtggtttaccaggtttggacatgatgcaatctcacttcatgcctaactcttctacccagttatctcaattacaacaaccaatgaatgcccaatcaaacactaacgttccatgggctatcaccaagaacgagaaacagatttatgacaaaatcttcaaggaatgggaccaggaccacaaaggatacattgacggtccttctgctatttctatttttggaaagtcgggactggctcgtcaagacttggagaagatttggaacttggctgatcagaacaacagaggtaagctgaacaaggacgagttcgctgttgccatgcacctggtttacagaagactcaatggtctagatattccaaatgttctgcctcctgaattgattcctccatcttccaagattttgaaggagtctttgaacgatatgaagtctaagttcagacagtccaacttcggttcctcatccaataatttgtctaaatctggtagagatggtactagattcaagaacaatgacgatgactttggatacaagctatccattcctgaattgaaaaagttggttcacgagaaacagatcatcttggatgcttacgactctcaggataccgatgtgcagaaacaatctgaccaactgactcaaaagactggtcacgatatcgagattctgaaagccaagattaaaaatattcagtcagagttaaatgagaagcaaccatttgactctaacgccccaggcttgtccaagcgtgatctgagacaaagaattgatagtttgagtgataaagtttcccacatcatggaccaaattttcaacgtcgaagagcaaatccaaaatgctaaaattgaacaagcccgtcttcgtattgaggaggaaaacccatcaggtgttgaacttaagggaactggaccaaacggaatcattactgagtcagacaagagacacgctaagtccagagccattcttaaatctcgtatggcttccttgactggaaaaaccgctccagacatcaacgctttcgaagccaacgaagagaagttggcagaagaggttgtcagaatcaaggcacaaactactgaaggtagatctttgatcgaagatgttcaaaactccatcaaagacctgaaggattcggctctgaattctttagaagaaagtgtttcaagtgaggtcggttttgaaaaatgggaaaagggtcagggtgtctcctccaaagaagttaaggagctgatcaagctgttgaatgatagcaagcccaaggttgctccagtttctgtcaagcaagatgtcgttgccgaacaagctccttcaaaggtcgcatctgtgccagtctctcaagaatcaacagggtcctcttctgttgcttctgaacctcacggtaccccagattcatactcttcttacaagaaccctgctgacagagctaagtatattaaggaacaggctgaaaagagaatgaacgagagattgcagaagcttggtatctccaggaaggccaagtcatcatcatctccacctgtcaaccagagctctccacacgacaaggctgctcaatctcctatccgttcccctgttggtaatgctcaaacatctgaagtcatcaagaagccaactgctacctccagtgacaataacgctgaaagactgccagagaaggagaccccagccaaagaaaccgtttctgccaagaatccagaatataaagaggaatcttccgatgacgacaacgatgaggagttgagaaaattgatggaagaaaaggccaggttggaagagcaacacaagcaaaagaaattaaagaagaagcaggagcgtgaggcaaagttggctgagcttagaaagcagatggaggaaatgagaaaggctgaggagtctgatgattcttgggatgaaaagacaccttcgcaggttccaactcaaccacccccaagagagactccagctcaagtacccgttgttaacatcgattccgtcaaatcagttccagagaagcctaaggaaattgttagagaaccagtccctgttgtgcgttctgctactagttctgagcacaaccctttttccaagccttctactgacaccgccactcctattcaagtcgccagtagcaatcctttcttcaaaccacagcaatcggagccagtcgtcgatccagttaaaattgaagctcagagattggcccaacgtggtgctgtcgctaacgacgatgatgatgactggggtgactcagatggaaatgactcctccgagggtgaggcccccaccagaaattcaggacctgctcatttggcctctctgctgtttagaaacggttcattgccaaaggtgcccactaccgagagttcatccgaaaaacgtgaagttcctgcctccagccagagttccaccttgaacttacagcctgagtcccaggcccaaccaaccaaaatagaaacttctaaggctggttcttctgattccgactctgactcccagttcggaacccctacttctggagctgccgacgatactttctcacctccgcccattccagaagctcccccggtacctcaagcacctccaatccctcaaggaattgctccaccgccagttcctcaaacttcagccggttctttctccccacaaattgaggcttcaccagctcaacctggtattgtcaccaaccactccggatcttccgttcctcctgtaccacaaacctctgttcccgccgctcctccttccgcccctccccttcctcaaacttccgctccaccagctccacctgcgccaccaattccccaaaccagtgctcctccagctcctcctgctccacctgccccaccaattccacaaatgtctgctcctcccgctccaccaactcctcagatcgctgctccatctgccccaacgcctccagccaccttaggtggtggtttgtcagctcttttgggtgaaatccagggaggtaaagctttgcgtaaggttgacccatcctctcaacatatctctgagggaacaactgttggaagagttttgtaa

SEQ ID NO: 3467 - DNA, 453 bp, Artificial Sequence
  Optimized genes for Pichia pastoris
atgcaaattttcgtcaagactttgactggtaagaccattaccttggaagttgagtcttccgacactattgacaacgttaagtccaagattcaggacaaggagggtattccaccagaccaacaaagattgatttttgccggtaagcaattggaggacggtagaactctttcagactacaacattcaaaaggaatctactttgcacttggttttgagactgagaggtggtggaaagaagaagaaaaagaagaactataccactccaaagaagatcaaacacaagcacagaaaggtcaaattggctgtcttgaactactacaaggttgacgatgatggtaaaattgagagacttagaagagaatgtgatacttgtggtgctggtatcttcatggctaacatgtctgacagacaatactgtggaaaatgtcacaccaccatcaagttgtctaaataa

SEQ ID NO: 3468 - DNA, 1842 bp, Artificial Sequence
  Optimized genes for Pichia pastoris
atggccgatggtgtgttccagggtgcaattggtattgatttaggtactacttactcttgtgttgctacctacgactctgctgtcgagattattgctaacgagcaaggcaacagagtcactccttctttcgttgctttcactccagaagaaagattgatcggtgatgctgctaagaaccaagctgctctgaacccaaagaataccgtcttcgacgccaaacgtctgatcggaagagcatttgacgacgagtctgtccagaaggatattaagtcttggccattcaaggtcgtcaacgacaatggtaaccctttgattgaggttgagtacttgggagagaccaagcaattttctcctcaagagattagttccatggttttgactaagatgaaggaagtcgctgaagccaagattggacaaaaagtggaaaaagctgttgttactgtgccagcttacttcaacgatgctcaaagacaagccactaaagacgctggtgctatttcaggattgaacgttctgagaattatcaacgaaccaactgctgcagccatcgcctacggtttgggtgccggaaagtctgaggaagagaagcacgttcttattttcgacctgggtggaggtaccttcgatgtctctcttttgcacattgccggtggtgttttcacagtcaaggccaccgctggagacactcacttgggcggccaagattttgacaccaacttgttggaattcttcaagaaggagttccaaaagaagactggtaaggacatttctgatgatgccagagctttgagaaggttgcgtactgcttgtgagagagctaaaagaaccttgtcttctgttgcccaaaccaccgttgaagttgattctttgtttgatggagaagattttacagctgagatctccagagccaagtttgaggccattaacgctgacttgttcaagtcaactttggagccagtcgaacaagttttaaaagattccaagatcgagaagagcaaggttgacgatgttgtcttggttggtggttctaccagaatccctaaggttcaaaagttgctgtctgacttctttgacggtaaacaattggagaaatctatcaatcctgatgaagcagttgcatatggtgctgccgtccaaggtgccattttgaccggtcaatctacttccgaggagacaaaggatctgctgttattggacgttattccattgagtcttggtgtcgccatgcaaggaaacgtctttgctcctgttgttccaagaaacactactgttcctactatcaagagaagaactttcaccactgtcgatgaccaccaaactaccgtgcaattcccagtttaccaaggtgaacgtgttaactgttccgaaaacaccctgttgggtgagtttgatttgaagaacatcccaccaatgtctgctggtgagcctgtcctggaagctatctttgaaattgacgcaaacggtatcttgaaagttactgccgttgaaaagtccactggtagatccgccaatatcactatttccaactccattggtcgtttgtcatcctctgaaattgagaaaatgattaatgatgcagataagttcaaaaaggctgatgaggactttgccaaccgtcatgagtccaagcagaaacttgaggcttacgtttcttccatcgaatccaccattactgatccaattctttcatctaagctgaagagatctgcaaaggacaagattgaatctgccttgtccgatgctttggccgctttagagttggaagacgcttctggtgacgatttcagaaaggcagaattggctcttaagcgtgtcgttaccaaggctatggctactagatag

SEQ ID NO: 3469 - DNA, 960 bp, Artificial Sequence
  Optimized genes for Pichia pastoris
atggctaccttgttgaaattgaacaatggtttaaagcttcctcaagttggattgggagtttggaagataccaaacgagttgactgctgagactgtttacaacgctatcaagcagggttaccgtctgtttgatggtgctgaagactacggtaatgaaaaggaagttggtcaaggtgtcagaagagctattgatgaaggtttggtcaagagagaagatttgttcattgtttctaagttgtggaacaactaccaccacccagacaacgtcggtaaggccttggacagaactttgtctgacttgggtcttgattacttggaccttttctacattcatttcccaattgctttcaagtttgttcctttggaggagaagtacccaccagctttttactgtggtgacggtaacaacttccactacgaggatgttccattgctggacacttacagagcccttgagagattggttgatgctggaagaatcaagtccttaggtgtttccaatttcaacggtgcattgttacaagatctgttgagaggtgccagaattaaaccagtcgctttgcaaattgagcaccatccatacctggttcaacaaaagctgattgaatacgctcaatccgaagatatcgttgtcgttgcttactcttcatttggtccacaatctttcttggaattgaaggttaacaaggctctgaccgctgtctccttgtttgaacacgatgtcattaagaagatcgcccaagctcacaacagatctgctggtgaggttttgcttagatgggctactcaaagaggattggccatcatcccaaagtcttccaagccagaaagactgtcctccaacttgcacatcaactcttttgacttgaccaaggaggacctggaaactatttcttctttggatcttggtctgagattcaatgatccatgggattgggacaagattccaatctttgcttaa

SEQ ID NO: 3470 - DNA, 666 bp, Artificial Sequence
  Optimized genes for Pichia pastoris
atgtctgaaacttacgacgagcaagttgttgccgagccagttgaagttcaatacgttgagctgtctaccaagattccagctgatatcagagaaggtgctgaggagatcaagctgttcaacaagtggtctttccaagatgttactgttaaggacatttctttgacagactacattcaaattagacaacctgttttcgtttcccacactgctggtaagtacgccgccaagagatttagaaaggctcaatgtccaattattgagagattgaccaactccttgatgatgaacggtagaaacaacggaaagaagttgttggctgtcagaattgtcaagcacgctttggagattatccacgttttgactgaccaaaacccattgcaagtcttggttgatgccattgttaacactggtgccagagaggactccaccagagttggttctgccggagctgttagacgtcaagccgttgacgtttctcctttgagaagagtcaaccaagctatcgctcttcttactattggtgctcgtgagtctgctttcagaaatatcaagtccattgctgaatgtttggccgaagagttgatcaacgctgctaagggttcctccacttcttacgctattaagaagaaagatgaattggaacgtgttgctaagtctaacagatag

SEQ ID NO: 3471 - DNA, 1449 bp, Artificial Sequence
  Optimized genes for Pichia pastoris
atgtttgccagattgcacgccaagagaggatggaaatccttggccagagcccgtgttggttccagattcctgtccaactcctctatcgctagagcagctcaaaccaaggacaacaacgacttctacgatgttaagactaagaagaacgatttcttcccagttcaagttgacggtatcgagtcttctcttggtaagtacgaagaatttgctaaggatgctcatgaatgggaatcttggaacttgcaaaacgaagatcatcctgagtacccagtgaaaagaacaaagatcagacacttcactttgaactttggtcctcaacatccagctgctcacggtgtcctgagactgatcttggagttgcatggtgaggaaattttgagatctgatccacacgttggattgctgcacagaggtactgagaaattgattgagtccaagacctacatgcaagctcttccttactttgaccgtttggactacgtttccatgatgactaatgaacaggttttctctttggctgttgaaaagttgttgaatttggaagttccagagcgtggtcaatacattagaaccttgttcggtgagatcaccagagttctgaaccacttgatgtctgttttgtctcatgctatggatgtcggtgccttgaccccattcttgtggggttttgaggagagagagaagttaatggagttttacgagagagtctccggtgcaagacttcactctgcttacgtcagacctggtggtgtttctcaagatttgcctgctggtctgctggatgatatctacatgtgggctactcaatttggagacaggttggatgagactgaagagctgttgactgactctagaatctggaagcaaagaactattggaatcggtgaagtcactgctgaggatgctttgaactacggtttgtctggagtcatgttgagaggttctggtgtgccatttgatattagaaagtctcagccatatgatgcctatgacaaggtcgactttgacattgccgtgggaaccaagggtgactgttacgacagatacttgatcagaatgaccgagttcagacaatctttacgtatcattgaacaatgttgtaaccaaatgccaccaggaccagtcaaggtggaagacttcaaggttgcccctcctccaagagctctgatgaaggaggacatggaagctttaatccaccactttttgttgtacactaaaggttacgccgtcccagccggtgaaacttacaccgccattgaggctccaaagggagaaatggctgtctatgttgtctctgacggatctgaaagaccatacagatgtaagattcgtgccccaggtttcgcccatttgggtgctttcgaccacattgctcgtggacatttccttccagacgccgttgctattattggtaccatggacttggtcttcggagaggttgatagatag

SEQ ID NO: 3472 - DNA, 2517 bp, Artificial Sequence
  Optimized genes for Pichia pastoris
atgattgacgagaagcaattgaaccagccaaagagatctgtgttgagaagactgcacatgttgttccttcctttgctggccatctccttcttcctgatctacttatctgacatcacccaaccactgttccgtgctagaaaggaggatgagaacccattggaaatctatctcaaggctctggaaaccaatgaagcccacaagtggtccaaggtgtacacatctcaacctcatcttgctggtaccaactacggtcttgttgagttcactaaatctaagtttgaggaatacggatttgaagcttccgttgatgactatgacgtttatctttcttaccctattgaccactccttggagctttacgagcactctgaagataagaacgacaagttactttataaggcatcattgcaagaggatgtcctttccgaagacccaaccacctccggtgacgatttgattcctactttcttaggttatggagcaaacggtaatgtctctgctgagtacatttatgccaattacggtactaaggaagatttcgaggacttggttgcaagaggtgttcctatcaagggtaagattgctgtcatccgttacggacaaattttcagaggtctgaaggtcaaatttgcccaagaatatggtgctattggtgctgttatttactcagatcccggtgatgattacggtattacaccagagaatggttacaagccatatcctcacggaaaggccagaaatccttcctcagttcaacgtggatccgctcaattcctctctgtttacccaggtgaccctaccactcctggtgttggttccaagaagggtgtcgaacgtgttgacccacatgccactaccccatctattccagttttgccattatcattcaaagatgctcttccaattcttaagaagctgaacaaggaaggtttatctgtcccagactcctggaagggaggattagaaggcgtcgactactctaccggtccagctaagaacattcatttgaatttgtattctgagcaaaactttaccatcactccaatctacaacgtttacggtgagattaaaggagaaaacgctgatgaagtcattatcatcggtaaccaccgtgacgcttggatcaagggaggtgcctctgatcctaactctggttctgccgctctaattgagctgtctcgtggtttgcacgctttgaccaagactggatggaaaccacatagaactattgttttggcctcttgggatgcagaagagtatggtttgatcggatccactgagtttggtgaacaatttgagaagttcttgcagaaaaaggttgttgcctacttgaacgtcgatgttgctgtggctggaactcacttacacctgggagcttctccttctttgtttaaactgttgaaggacaatgccaaagaaattaccttcaagaattctactgaaactttgtacgacaactacgtcaaggatcatggaaacgatatcatttctacattgggttcaggatcagactacactgttttcttggaccatctgggtatcccatccttggatattggtttcattgcaggtaaaggcgatccagtctatcactaccattccaactatgattcataccactggatttcaacttctggagatccaggttttgagtaccacaatgttttagccaagtacttgggatctctggttcttaacttgagtgagagagaggttctgtacctgaaattgcacgattatgctaccgagttgttaaagtatttgttggaggcttatgctcagatgccagaagaatgggacgacgaagttatcggctttagatcctcttcttgtcacagagctaaggcttctcatcacggaaaagaccctcaccatgagggtcgtagacatcatggtaagggattccattcaaagggtggaccacaccacggtgagagacaccacggtaaggggtttcatgctgaaggtggtccccaccacgaaaagggtcctcatcatgagaaaggtctacacgttgaaggagagccacaccaccaaaagggccctcatttcgaaaaaggtttccaccatgacatggaaatgtaccataagaagttggctcatcacggcaaagagcctaagaccaagttgaagcacttgaagaaacaagttgagtctttaattattgattttgctaacactactcaaacttacgatgcttacaccgactttttacaaaagcagcacgagatcagagactctttgtctttctgggaaaagattaagcttcacttcaagatcaaagctgccaacttcaaacttaaatactttgaaagagtctttttgcatgaaaatggattgaaaaacagagaatggttcaagcatattgtctacgctgctggtagaaacaccggatacgccggtcaaagattgcctggattggtcgaggccattgaagacaaaaatcttcatgatgccgttaaatggttgcacattttgtccaaaaaaatcgactcattacagaagtctcttgaatag

SEQ ID NO: 3473 - DNA, 2667 bp, Artificial Sequence
  Optimized genes for Pichia pastoris
atgtctaccgctgccccaattaaggaggagtctcaatttgctcacttgaccttaatgaataaagacatcccttccaatgccaagcaagctaaatccaaggtttctgctgctcctgccaagactggttccaaatctgcaggaggtagtggtaacaacaacgccgctccagtcaagaaaagagtcagaaccggttgtttgacttgcagaaaaaagcacaagaagtgtgacgaaaacagaaatcctaaatgtgatttctgtactcttaaaggtctggagtgtgtttggccagaaaataacaagaagaacatttttgttaacaattctatgaaggacttccttggaaagaagactgttgacggagctgactccttgaatcttgctgttaaccttcagcaacagcagtcttctaacaccattgctaaccagtccctttcctcaattggcttggaatctttcggttacggttctggtatcaaaaatgagttcaacttccaggacttgattggttcaaattcgggatcttctgatccaactttttccgttgatgctgatgaagctcaaaaacttgatattagcaataagaatagtagaaagagacagaagttgggtcttcttcctgtttctaatgctacctcccacctgaatggattcaatggtatgtcaaacggtaagtctcactcctttagctctccttctggaactaatgacgatgagctgtccggtttgatgtttaactctccatccttcaaccctttgactgtcaacgactcaaccaacaatagcaaccataacatcggtttatcaccaatgagttgtcttttcagcaccgtccaggaggcttcacaaaagaagcatggtaattcatcaagacacttctcttacccatctggtcctgaagatctttggttcaacgagtttcaaaagcaagcccttactgccaacggtgagaacgctgtccaacaaggagacgacgcttctaagaacaacactgctatcccaaaggatcaatcctccaattcctctatcttctcctccagatcctctgccgcatcttccaacagcggtgatgacattggaagaatgggtccattctcaaagggaccagagattgaatttaattacgactcttttttggagtcattgaaggctgagtccccatcttctagcaagtacaacttgcctgagactctgaaggagtatatgaccttgtcatcctctcatcttaactctcagcattctgacactttggccaacggaaccaatggcaactattcttccactgtttcgaacaacttgagtttgtccttaaactcattcagtttctccgacaagttctctttatctccaccaaccatcactgacgccgagaagttttctctgatgagaaactttattgacaatatctccccatggtttgacacctttgataacacaaagcagtttggtaccaaaattccagttctggctaagaagtgctccagtctttactacgctatattggctatttcatctagacaacgtgagagaatcaagaaagagcacaacgagaaaacattgcagtgctaccaatactctcttcaacaactgattcctactgtgcaatcaagtaacaacattgagtacatcatcacctgtattttgctttctgttttccacatcatgtcctctgagccttccacccaaagagatatcattgtctctttggcaaaatacattcaggcttgtaacatcaacggtttcacttccaacgataagcttgaaaagtccattttctggaactacgttaatttggaccttgccacttgtgccattggtgaagaatcaatggttattccattttcttattgggttaaggaaactactgattacaaaactattcaagatgttaaacctttcttcaccaagaagacctctacaaccaccgatgatgatttggatgacatgtacgccatctacatgttgtatatttccggtagaattattaatctgctgaactgtcgtgatgccaagttgaattttgaaccaaaatgggaattcttgtggaatgaattgaacgaatgggagttgaacaagcctctgaccttccaatctattgttcaattcaaggccaatgatgaatcccaaggtggttctactttcccaacagttttgttctctaactccagatcttgttactccaaccaattgtaccacatgtcctacattatcttggttcagaacaagccaagattgtacaagattccttttactaccgtttccgcttccatgtcttcgccttcagacaacaaagccggaatgtcggcctcttcaactccagctagtgaccaccatgcctcaggtgaccatttgtctcccagaagtgttgagccaagtctgtctaccactttgtctcctcctccaaacgctaatggtgctggaaacaaattcagaagcactctatggcacgccaaacaaatttgtggtatttctattaacaataaccacaatagtaatttagctgctaaggtcaattctttgcaaccattgtggcatgctggtaaactgatctcttccaagtctgaacacactcaattattgaaattgttgaacaacctggaatgtgctactggatggcctatgaactggaagggtaaggaattgatcgactactggaacgttgaagagtaa

SEQ ID NO: 3474 - DNA, 315 bp, Artificial Sequence
  Optimized genes for Pichia pastoris
atggctttgtttgactccatttccaacgttgtcaaggaccaattgaaagacaaggaggcttcatcaaaggacacttctgctactgaagcttctaccaagggagaagagccaaagaagactgaggaggccaagaagcaggagattgagggttacactcaagatttgaaggatattgctgctgccgttcaaaaaggtgacttcaagggtattcaaaaggaagtttctgagttggctggtaacaagcaattccaagctgatgctaaggagtacgcttccaaggctttctctaagaaagaaggtggttcttccgcttaa

SEQ ID NO: 3475 - DNA, 1827 bp, Artificial Sequence
  Optimized genes for Pichia pastoris
atgtcttctaagcactgggactacaagaaagatttggtcttgtctcacttggctggtttgtgtcaatctaacccacacgttagattgattgagtccgagagagttgtcatctccgccgagaaccaagaagataagatcaccctgatctctggtggtggttccggtcacgagcctttgcatgctggattcgtcactaaagatggcttgctggatgcagctgttgccggtttcatctttgcttctccatctactaagcagattttctctgccatcaaggccaagccttccaaaaagggtactttgatcattgtcaagaattacacaggtgatattttgcactttggtttagccgctgagaaagccaaagctgaaggtttgaacgctgagctgctgattgtgcaagatgatgtttccgtcggaaaggcaaagaacggtctagttggtagaagaggtctggcaggtacctctttagttcacaaaattcttggtgctaaggcttatttgcaaaaggacaatcttgaactgcaccaattggttaccttcggtgagaaggtggttgccaatttggtaactatcggtgcatctcttgatcatgttactattccagctagagccaacaagcaagaggaggatgactctgacgatgagcacggttacgaggttctgaagcatgacgagtttgagattggtatgggtattcacaatgaaccaggaatcaagaagtcttccccaattcctactgtggacgaacttgtcgctgaattgttagagtacttgttgtccaccactgacaaggacagaaactacgtccaattcgacaagaacgatgaagttgttcttttgatcaacaacttgggtggaacctccgttttggagttgtatgctattcaaaacatcgtcgtcgaccagttggcctctaaatactccattaagccagtcagaatttttactggtactttcactacttccttggacggtcctggtttttctattactctgttgaatgccaccaagaccggtgacaaagacatcctcaagtttttggaccacaagacttctgctcctggatggaactccaacatttcagactggtctggacgtgttgacaactttatcgttgctgctccagagatcgatgagggtgactcctcatccaaggtttctgttgatgccaagctgtacgctgacttgcttgagtctggtgtcaagaaggtcatttctaaagagccaaagattacattgtacgacactgttgctggtgatggagactgtggtgaaactcttgcaaatggatccaatgctatcttgaaggctcttgccgaaggtaagttggatttaaaggatggtgttaaatccctggttcaaattaccgacattgttgagactgctatgggaggaacttcaggaggtctttactctatcttcatttccgctttggctaaatctttgaaagaaaaggagctttctgaaggcgcctacaccttgaccttggaaaccatcagtggttctctgcaagctgcattgcagtctttgttcaagtacactagagccagaaccggagatagaactttgattgacgctctggaaccttttgttaaggaatttgccaagtccaaggatctgaaactggctaataaggctgcccacgacggagctgaagctaccagaaagttggaggctaagttcggaagagcttcttacgttgcagaggaagagttcaaacaatttgaatccgaaggaggattgccagatccaggtgccattggacttgctgctttaatcagcggtatcactgatgcttacttcaagtctgagaccaaattgtaa

SEQ ID NO: 3476 - DNA, 1062 bp, Artificial Sequence
  Optimized genes for Pichia pastoris
atgtccaacaacactactcaaaacctggctgaacaaaaaggtatccaaaccgacttggtcactcttactagattcattctggatgaacagaagaagtccgctccaaacgccaccggtgagctgaccttgcttttgaactctttgcaatttgctttcaagtttattgctcacactatcagaagatctgagttggttaacttgatcggtttggctggtgttaccaacgctactggtgatgaccaaaagaaattggatgtcattggagatgagattttcatcaatgctatgaagggttctggaaatgtcaagttgttagtctctgaagagcaagaggatttgattgtttttgagtcttccaaaggaaactacgctgttgtttgtgatccaattgacggttcatctaaccttgatgctggagtttctgttggtaccatcttcggtgtttacaagctgcttccaggttctgccggatccattaaggatgttctgagatccggtactgaaatggttgctgctggttacaccatgtacggtgcttcttctcatttgatgttgaccactggtaacggagtgaacggtttcactttggacactgaccttggtgagttcattttgacttacccttctctgaagattccacacaccagagctatttactccatcaacgaaggtaattctcactactggactgatggtgtcaacgagtacatcgcttccttgaagaagcctcaagctaatggtaagccatactctgctagatacattggttccatggtcgctgacgttcacagaactttactgtacggaggtatttttggatacccagctgattccaagtctaaatctggtaaattgagagttttgtacgaatgtttcccaatggctttgctgttggagcaggccggtggtgaagctgtcaacgacaagggtgaaagaatcttgaatcttgagccaaagcaagttcatgagcgttccggaatttggttgggatctaagggagaagttgagagattgttgccatatttgaccaagaagatcaagattcaatctgtcaatttgtaa

SEQ ID NO: 3477 - DNA, 1095 bp, Artificial Sequence
  Optimized genes for Pichia pastoris
atgaaggctttgatcttggttggtggttacggaaccagattgagacctttgactttgtccgttcctaagccattggtcgagtttgccaacaagccaatgattttccatcaagttaaagccttggccgaggccggtgtcactgatatcgttctggctgtcaactacaagcctgaagttatggttggagctctgagagagtacgaaaaagaatgtggtgtgaacattactttctctgtggaagaagagcctcttggtactgctggacctctgaagttggctgaatctgttttgaccaagaatgatgagccaatttttgtcttgaactctgatgttatctgtgattaccctttcaaggaccttgctgctttccacaaggcccacggtgctgaggctactattgttgccactaaagttgacgagccatccaagtacggtgttattgttcatgacagagacattccaaatcttattgatagatttgttgagaaaccagttgagttcgttggaaacagaatcaatgctggtatttacatcatcaacccttccgtcatctctctgattgaaatgagaccaacctctattgagaaggaaaccttcccattactggttgaaaagaagcaattgtactcttacgacttggagggatactggatggatgtgggtcaaccaaaggacttcttgtctggtacctgtttgtatttgtcttctttggctaagaaggagagatccgctcttacccctacttctgaaccattcattaatggaggtaacgttttgattgacccaactgccaaggtcggtaaggactgtaagattggtcctaacgtcgtcattggaccaaactgtgttatcggtgatggtgtcagaattcaaagatctgtcattttgaagaactccaacatcaaggatcatgcttgggttaagtctaccattgtcggatggaactcaactgttggtaaatgggctagactggaaggtgttaccgttttgggtgaagatgtcaccgtcaaggatgaaatctacgttaacggtggaaaggttcttccacacaaatccatttctgctaatgtcgacactcctcaaattatcatgtaa

SEQ ID NO: 3478 - DNA, 1098 bp, Artificial Sequence
  Optimized genes for Pichia pastoris
atgaagattgttttggtgttgtactctgctggtaagcatgctgctgatgagccaaagctttatggatgtattgaaaatgaattgggtatcagacaatggttggagaagggtggtcacgagttagtcactacttctgataaggaaggtgagaactctgagttggaaaaacatattccagatgccgacgtcatcatttctactccattccaccctgcttacattaccaaagagagaattcaaaaggctaagaagttgaagctgttggtcgtcgccggtgtcggttctgaccacattgacttggactacatcgagcaaaacggattggatatttccgttctggaagttactggttccaacgtcgtttctgttgctgagcacgttgtcatgactattctgaacttggtcagaaattttgttccagcccatgaacaaattgtcaaccacggttgggatgtggctgccattgccaaggatgcatacgacattgagggaaagaccattgctactattggtgcaggtagaatcggatacagagttcttgaaagattggttgctttcaaccctaaggagcttctgtactacgattaccaaggtttgccaaaggaggctgaagaaaaggttggtgccagaagagtcgacactgttgaagagctggttgcacaagctgacgttgttaccgtcaatgctcctttgcacgctggtactaagggattagttaacaaagaacttttgtccaagttcaagaaaggtgcttggttagtgaacactgctagaggagctatctgtaacgcccaagatgttgccgatgctgttgcttctggtcaattgagaggttacggtggagatgtttggttcccacaaccagctccaaaagatcatccatggagagacatgagaaacaagtacggttatggtaacgctatgaccccacactactcaggaaccactttggacgctcaagttagatacgccgagggtaccaagaacatcttgaattctttcttgaccaagaagtttgactatagacctcaggatgtcattttgttgaacggtaaatacaagactaaggcctacggaaacgacaagaaggtcgcttaa

SEQ ID NO: 3479 - DNA, 747 bp, Artificial Sequence
  Optimized genes for Pichia pastoris
atggctagaactttcttcgttggaggtaacttcaagatgaacggttctaagaagtctatccacgagattattgagagattgaacaacactaagttgccagaaaacgtcgaggtcgttattgccccaccagctccatacctgcaacaagctgtcactgagaacaaacaaaagactgtttacgtttctgctcagaactctttcgacaaggcttctggtgcctacactggtgaagtttccgttgaagctctgaaggacttgggtgttccttacgtcattcttggtcactctgaaagaagaaccatcaacaaggaagatgacgctttcattgcttccaagaccaagtttgctttggaccaaggtttgaaagttattttgtgtatcggtgagactttggaggagaagcaggccaacatcaccttggatgttgtcaagagacaattgcaagccgttgttgacgttgtgtctgactggaccaacattgttgttgcttacgagccagtttgggctattggtactggattggctgctactccatctgatgctcaagatgtccacaagcaaatcagagattttttggccactgtcatcggaaaggatcaagctgaaaaggttagaatcttgtacggtggatctgtcaatggtaagaacgctgttgagttcagagacaaagctgatgtggatggtttcttggttggtggtgcttctttgaagccagagtttgttgatatcatcaattccagaaactaa

SEQ ID NO: 3480 - DNA, 1029 bp, Artificial Sequence
  Optimized genes for Pichia pastoris
atgattgttcactctccaatcgttaccagaagattggctacctctgccagagtcccaattagaactcttgcaacttcctccaacggtctgaacttcttccaaaagactcaattgccagccaacactatcatcagattcgtccctcaacaaactgcttggattgttgagagaatgggtaagtttcatagaattctgcaaccaggtttagctatcttgcttccattcttggacaagatccaatacgttcaatccctgaaggaaaacgctattgaagttccttctcagtccgccatcacttctgacaacgtcactttggaaatggatggtgttttgtacattagagttgttgacgcttacaaggcttcttacggtgtcgagaatgccgagtacgccatttcccaactggctcaaaccaccatgagatctgaaattggtcaattgaccttggatcatgttctgagagaaagacaatctttgaatgtcaacatcaccgctgtcttgaacgatgctgctaaggactggggtattcaatgtttgagatacgagattagagacattcatccaccatctaacgttttggaggctatgcaccgtcaagtttccgctgagcgttccaagagagccgagatcctggactccgagggtcacagacaatctgctattaacattgctgaaggtgagagacagtctcaaattcttgcctctgaggccaccaagttcaagcaaatcaacttggcagaaggagaagctagagctattttgttgaaggccgaagccacttcaaagggtatcgaacagatcgctaacgccatcagaaacaccccaggaggtggtgacgccgtctccttgcaagtcgctgagaagtacgtcgatgcctttggaaagttggccaaggagtctaatactattgtcattccagctggtttgggtgatgtttcttcttggatggcttccggtctttccatttaccaaaaccttcagaagtccaatgctactaaggatcagaacaagattgaggagaccaaataa

SEQ ID NO: 3481 - DNA, 1548 bp, Artificial Sequence
  Optimized genes for Pichia pastoris
atgtctctggttcaagaattgattcagaagatttcaagtttggagctgactttggttgaaaagttgtccattctttttgttgctccattcctgttgaatgccttgtggcaattcatctactccttccgtaaggatagagttccattggtgttccactgggttccatgggttggttccgctgttacttatggtatgcaaccatacgagttctttgccgactgtcaaagaaagtatggagatgttttcgctttcgttctactgggaaaggttatgaccgtctacttgggtcctaagggtcatgaattcattctgaatgctaagctcaatgatgtctgtgctgaagatgcttacaagcacctgaccaccccagtttttggagaaggtgtcatttacgattgtccaaactggaagctgatggaccaaaagaagttcgtcaagggatctcttaccaaagagtctttcagatcatacgtcccaaagatcagagacgaagttcttgactacatcaacaacgatcctaacttcatgggtggtgactctaaaaagaagactggtaagaccaacgttctgaactctcaatctgaacttaccattttgactgcttctagatctttgcttggtgatgacatgagaaagcttttgaccaagaaatgggccaaattgttctctgatttggacaagggattcactccattaaactttattttttctcatctgccattgccatcttactggactagagatcatgctcaaaaaactatttctgagacttacctgtctttaattaacaagagaagagctactaatgacattggagacagagaccttattgactccttgatgaagtcttccacctacaaagatggttctaagatgactgatgaggagatttcccacttgctgattggtgttttaatgggaggtcaacacacttctgcctctacttcatcttggttcttgttgcatttgggtgagaagccagaactgcaggaagagttgtttgaagaacaagagagagtcttgcaaggtagagagcttacttacgacgacttggccaacatgccactgcacaaccaagttatcaaggagaccttgagaatgcacatgcctttgcactctattttcagaaaagtcaccagacctcttcctgttcccaactccaagtacgttgtccctaaaggtcactacgttttggtctctccaggttttgctatgacaaacgacgcctacttcccaaacgcttccgacttccaacctcatagatgggatgaaactgttgagcctgtttctgctgatgccaaggaaaccgttgattacggtttcggtaaggtctccaagggtgtgtcttctccttacttaccatttggtggtggaagacacagatgtatcggtgaacactttgcatactgtcagttgggaactatcttgaacacttttgtcagaactttcaagtggaaagccgttgttcctcagccagactacacttccatggttacccttccagagccaaatttgtctaccatcacttgggaaagacgtgacaactaa

SEQ ID NO: 3482 - DNA, 1671 bp, Artificial Sequence
  Optimized genes for Pichia pastoris
atgactttgtccaataacaccaagagaagagagtccagtatcactccagaccaacagaagctgattgagaagtacttggaaaagaagaacgttcaccatcaaaagaaacttcaacacgttacccacacttccaccaacgtcaacttgtcttctatcaaatggaagtcgttgcgtttggaggactgtggtgtttcaatccctgattccggtttgccagctaagatcgcttacgagtctatccatgactctttaaaccttgacggtaacccaactttgaatcttgcttctttcgttaacactggttacattaatgactactctgagccattaattcacgagaatctggttaagaatttggctgacaatgatgagtatccagtgatgcttgaacttcatgaaagatgtttgcaaatgttgactgaattgtggaacggtgactccaaaaagtctattggatctgctactactggatcaagtgaggccattatgttgggtggactggctatgaagaagaactggcaaactaagcgtagagctgctggaaagtcaactgagaaacctaacattatcatggcttcctgttgtcaagttgccttagagaagtttgccagatattttgaagttgatgctagaatcatctcttgtgacaacaacgactacatcttggattacgatttgatttacgacgcctgtgatgaaaacacaattggtattttcgtcatcctaggttctacttacaccggtgctttcgaagatgttgctttggtgaacaagattttggacagagttgaaaaggagaagggtttcgacattccaatccacgtcgatggtgcctctggagcttttgtcgctccattcatctaccctgacttggaatgggatttcagagttccaagagtcaagtccatcaacacttctggtcataagttcggtttagtcactgccggtcttggttggatcgttttcaaagacaaggaatggttgccaaaggatttggtctttgagttgagatacctgggtggtctggagtactccttcactctgaacttctctagaccaggtcaccaagtcattcatcagtatttcaactttgttgctttaggtaagaatggatactcatccatttttgatacttgtcttactaacgctagattgttgtcatcattcttggaggaaactaattacttcaaggttgtttctaatgtccacagacctgttgaggctggtaccactcctcatgctgatgatcatttggccttccacccatctcttccagttgtcagtttccaattcaatgaagagttctccaagcaatacccagagattcctcaatctattatttctaccctgatgagaaacaaaggatggattatcccaaactacccattgcctagaactacaaagccagtcaaagatgacgagagagaaattctgagagtcgtcgttcgttacaacctgaccttggagctgctgcaaaaattgatgtctgatattgtttccactcttactgttttgaccaattcatgtaagttgatcagagaatctttgaacaacgatgccctggaagacactgatatcatttatgacatgctgttgtcaattgctcttgatggatccgagaacttggttaaatcttccatcaaggaccacaagcacgctggtgcttgttag

SEQ ID NO: 3483 - DNA, 1140 bp, Artificial Sequence
  Optimized genes for Pichia pastoris
atgtctactgaaggtcaaattattaagtgtaaagctgccgttgcctgggaagccggtaaggatctttccattgaagagattgaggtcttgccaccaagagcccatgaagttagagttaaggttgagttcactggtgtttgccacactgatgcttacactttgtccggtgctgacgctgagggttctttcccagtcgttttcggtcacgaaggagcaggtgtcgtcgagtctgttggtgagggagttgaatccgtcaaggtcggtgattccgttgtccttttgtacaccccagagtgcagagaatgtaagttctgtctttctggtaagaccaacttgtgtggtaagattagagcaacccaaggaaagggattgcttcctgatggaacttccagattcagatgtaaaggaaaagatttgttccactacatgggatgttcttccttctctcaatacactgttgttgctgatatttctgtggtcaaagttcaagatgaagctccaaaggacaagacttgtttgttgggttgcggtgtcaccaccggttacggtgccgctattaacactgccaagatctccaaaggtgacaaaattggagtgtttggagctggatgcattggtttgtctgtcatccaaggtgctgtttctaagggtgcttctgagatcatcgttattgatatcaatgactccaagaaggcttgggccgaccaatttggtgccaccaagtttgtcaacccaactactcttccagaaggtactaacattgttgactatttgattgacattactgacggtggtttcgattacacatttgactgtactggaaacgtccaagttatgagaaacgctttggaatcttgtcacaagggatggggtgaatcaatcattatcggtgttgcagctgctggtaaggaaatttccaccagaccattccaattggttaccggaagagtctggagaggttgtgctttcggaggtatcaagggtagaactcaaatgccatctttggtccaggactacttggatggtaaaatcaaagttgatgagtttatcacccacagacacgacttggacaacatcaacaaggccttccatgacatgcacgctggtaactgtatcagagctgtcattaccatgcattaa

SEQ ID NO: 3484 - DNA, 399 bp, Artificial Sequence
  Optimized genes for Pichia pastoris
atgtctgaaacttctgctccaagaccaactattgtcaagaagtacaccaagaagttcaagcgtcaccactctgacagataccacagagttggtgagtcttggagaaagcaaaagggtattgactcttgtgttagaagaagattcagaggtaccatcagacaaccaaagattggttacggttccgacaagagaactaaatacatgttgaagtctggtcacaaggctttcgttgtcaacaacgctaaggaattggatgttttgctgttgcacaaccaacaatacgctgctgagattgctcatgctgtttcttccaagaacagagtccacattttggctagagccaaggagttgggtatcaaggttaccaaccctcaaggtagattgaacttggaggcttaa

SEQ ID NO: 3485 - DNA, 651 bp, Artificial Sequence
  Optimized genes for Pichia pastoris
atgtctcaaggtaccatttatttggtcttggcttctccaagatcttctttgttcaaggaccttattgagtactacggtttggatatcaagatttctgacacttctgatccagagtttgccaagactttcccactaaagagaactccatcttttaagggtcctgactttgttttgcacgaggctcttgctattttcgtctacatcacctctctgattcctcaaaaccacggtctttatggttcttccaacttggactacgctcaaactatcaaatggttgtctttcactgcttccgagatcatctctggtttagtccaagccttgtacccattaattggtaaccttccatactccaaggatggtgttgaccaagctctgaaggatttggagtcttacgttgccgtttacgagacccaattgaagcagaccaagtacttggttggtgacaagatcactttggccgacttgtttgctgttcaatctatcagatggggtctgcaatacatttgggatgtcaactggttaaagcaacaccctttgattgatgcttggttcaaagatgttactcaacatccaattattgtcaagtctttgggtgatttcaagccattgcaaaaggctttgccaaacgctccaccaaagggaaactaa

SEQ ID NO: 3486 - DNA, 1233 bp, Artificial Sequence
  Optimized genes for Pichia pastoris
atgattttcgacggaaccaccatgtccattgctattggcttgttgtctaccttgggtattggtgctgaggctaaggtccactctgccaagatccacaagcacccagtctctgaaactttgaaggaggccaacttcggtcaatatgtttccgctctggagcacaaatacgtttccttgttcaacgagcaaaacgccctttccaaatctaatttcatgtctcaacaagatggtttcgctgttgaggcttctcatgatgctccattgaccaactacttgaacgctcaatactttactgaggtctccctgggtacccctcctcaatctttcaaggttatcttggacactggttcttccaacttgtgggttccatctaaggactgtggttcattggcttgtttcttgcacgctaaatatgaccacgatgagtcctctacttacaagaagaacggttcttcttttgagatcagatacggttccggttccatggaaggatacgtctctcaggatgttcttcaaattggagatctgactattcctaaggtggactttgcagaagctacttccgaaccaggtttagcttttgcctttggtaagtttgacggtatcttaggtcttgcttacgattccatctctgtcaacaagattgttcctccaatctacaaggctttggaattggatttgctggacgagccaaagttcgccttctaccttggtgatactgacaaagatgaatctgatggaggattggccactttcggtggtgttgacaagtccaagtatgaaggtaaaattacttggttgccagttagaagaaaagcctactgggaagtttcatttgatggtgtcggtttgggatctgagtatgctgagttgcaaaagactggagctgccattgacaccggtacttctttgattgccttgccttctggccttgccgagattttgaatgctgaaatcggtgccaccaagggatggtctggacagtacgctgtcgattgtgataccagagactcccttccagacttgactcttacttttgctggttacaactttaccatcactccttacgactacactttggaggtttctggttcttgtatttctgctttcactccaatggatttcccagagccaattggtcctttggctatcattggtgactcttttttgagaaagtactactctgtttacgaccttggaaaggatgccgttggtctggccaagtctatctaa

SEQ ID NO: 3487 - DNA, 804 bp, Artificial Sequence
  Optimized genes for Pichia pastoris
atgcttacccacactgtcttgagagctggtaccaagagaacctgttccactctttcagttgttagaggtcttgccactgtttctcaaaaccaaccaagattgaagtctttcaaggtttaccgttggtctccagacactccagagattaagccacacatgcaggagtacaagatcgacttgaatgaatgtggtccaatggttttggacgctttgctgaagatcaagaacgagcaagatgctactttaactttcagaagatcttgcagagaaggtatctgtggttcctgtgccatgaacattggtggtagaaacactttggcctgtctttgtaagattgatcagaacgaatctactgagttgaaaatctacccattgcctcatatgtttgttgtcagagatttggttcctgatttgactcacttctacaaacaatacaagtccattcagccattcttgcaaagagactccgttccatctgatggaaaggagaacttgcaatctattgaggacagaaagaagttggatggtctgtacgagtgtattttgtgtgcttgttgttctacctcttgtccttcttactggtggaaccagcaagagtatttgggaccagctgttttgatgcaagcttacagatggttgattgactctcgtgaccaagcctctgttgccagaaaagaaatgttgcagaattccatgtctttgtacagatgtcacaccatcatgaactgtgctagaacttgtccaaagggtttgaacccaggtaaggctattgctgagatcaaaaagcaattggctttcgattag

SEQ ID NO: 3488 - DNA, 1212 bp, Artificial Sequence
  Optimized genes for Pichia pastoris
atggccggtgccactagaatcaactccagagttgtcagatttgctatttttgcctccatcttggttttgttgggttttattttgtctagaggttctgccacctcttactcccttccatctggtttgacttccgacacctcccaatctactggatcttctccaaagtctgaatccaagccatcctctcaaggttcaagtggtgctactgagttgaagaaaacttacactactgatggtaaggagaaggcaactttcgtttccttggccagaaactctgacgtttggtcattggcttcttccattcgtcacgttgaagacagatttaaccacaagttccactacgactgggtttttttgaacgatgaggagttttccgatgaattcaagagagtcacttctgctttgacctcaggaaaggccaagtacggattgattccaaaagaacactggtctttcccagaatggattgataaagagcgtgctgcaaagactagaaaggaaatggctgctaagaaggttatttatggtgactctatctcctacagacacatgtgtagattcgagtctggattctttttcagacatgaattgatgcaagagtacgaatggtactggagagttgagccagacattaagatttactgtgatattgactacgatgttttcaaattcatgaaggacaacaacaagatgtacggtttcactgtttctttgccagaatacgttgctaccattgaaactttgtgggacactaccagagctttcatcaaggagaatcctcaatacttgcctgaagataacatgatggatttcatttctgatgacgacggtctttcatacaacggttgtcacttctggtccaactttgaagttggttccctgtctctttggagatctgaggcttacctgaaatactttgaccacttggacaaggctggtggtttcttctacgagagatggggtgatgctccagttcactctattgctgctgccttgttcttgcacagagaccaaattcatttcttcgacgatgtcggttattttcacaacccattcaacaactgtcctgttgatgccgacttgagagaggaaagaagatgtatgtgtaaccctaaggatgattttacctggaagggttactcttgtgttccagagttcttcaccgtcaacaatatgaaaagaccaaagggatgggaagccttctccggttag

SEQ ID NO: 3489 - DNA, 612 bp, Artificial Sequence
  Optimized genes for Pichia pastoris
atgaactccgagtacgactacttgttcaaattgctgttgattggtgactctggtgtcggtaaatcttgtttgcttttgcgtttcgctgaggacacttacacccaagattacatttctactattggagttgatttcaagatcagaaccattgagttggatggtaagaccatcaagctgcaaatttgggatactgctggtcaggagagattcagaactatcacttcttcttactacagaggtgctcacggtatcatcattgtttacgatgttactgaccaagaatctttcaacaacgtcaaccaatggttgcaagagattgacagatacgctactggtggtgttatgaagttgttggttggtaacaagtctgacttgaaggacaagaaggttgttgactacactgttgccaaggagtttgctgatgctttggaaattccattgatcgagacctctgctttggactccaccaacgttgagcaagccttctttaacatggctagacaaatcaaatcccaaatggttaacaatcaagctggatccggtactgagaaggcttctatcaacttgagaggtcaatctgttggaggttctcaaaactcttcctgttgttaa

SEQ ID NO: 3490 - DNA, 1131 bp, Artificial Sequence
  Optimized genes for Pichia pastoris
atggacggtgaagatgttgctgctttggtcatcgacaacggttccggtatgtgtaaggctggttatgctggtgacgatgctccacacactgttttcccttccgttgtcggtagaccaagacaccaaggtgttatggttggaatgggtcaaaaggattctttcgttggtgatgaagctcaatcaaagagaggaattttgaccttaagatacccaatcgagcacggtatcgttaccaactgggatgacatggagaaaatctggcatcacaccttctacaacgagttgagattggccccagaagaacatccagtcttgttgactgaggctccaatgaacccaaagtctaacagagaaaagatgactcaaatcatgtttgaaactttcaacgtcccagctttctatgtttccattcaagctgttctgtctctgtacgcttccggcagaaccaccggtattgttttggactctggagatggtgtcactcacgttgttccaatttacgccggtttctctcttcctcatgctattctgagaattgacttggctggaagagatttgactgactacttgatgaagatcttgtctgaaagaggttacactttttctacttcagctgagagagagatcgtcagagacatcaaggaaaaattgtgttacgttgccttggattttgaccaggagttgcaaacttcctctcaatcttcttcaattgagaagtcctatgaattgccagatggacaagttatcactattggtaacgaaagattcagagctcctgaagcattgttccacccatctgtccttggtttggaggcctctggcattgatcaaaccacttacaattctattatgaaatgtgacgttgatgtccgtaaggagttgtactccaacattgtcatgtctggtggtactaccatgttcccaggtattgctgaaagaatgcaaaaagagcttactgctcttgccccttcttccatgaaggtcaagatttctgctcctccagagagaaagtactctgtttggattggaggttctatccttgcttctttgggtacctttcaacaaatgtggatctccaagcaagagtacgacgagtctggtccttcgattgttcacttgaagtgtttttag

SEQ ID NO: 3491 - DNA, 549 bp, Artificial Sequence
  Optimized genes for Pichia pastoris
atgtctggaggtcctgttccagtcttcaagaaatacactactggatccaagggtatctgggaaaagatcagacaattgcttactcttgttcctaacagatctactggtaaccctttggtcaaaaactacagagtccctcctccaggttctcaaactttgaagtacaaggaccctgtcactattccagctggtgacattgttaagaaccaatactacgacagagaccacagaagaaactatcctcgtttggttgcctttgatcaaaccaaggtctctggtttgttgaccttgggatctgctcagaacccaagaatttccgttggtgagaagggacaaaaggagttggctgttttcgaccaatctgtttccttgtcttctaccttggccaccattgacccaaaggttgtcaagtctgaattgctggctgaaggtggttccccagttgttgctccatctttgaacaagaagatgaagttcagattgactgaggagtctgagcacggtatgtaccctgaagactacccaattcgtatttttgctcaaaactaa

SEQ ID NO: 3492 - DNA, 435 bp, Artificial Sequence
  Optimized genes for Pichia pastoris
atgtctgacgttgagcaacaagttgtcgaggaagtcgaagttgctgttgaagaaacttctgcttctatttccattgaagatgctgtcaagaaggtgctgagaatttctttggtccacgatggtttggctagaggtttgagagaagcttccaaggctttgtcttctggtgctgctcaattgtgtgttttatgtgattccgtcactgatgaggccattattaagttggttgaggctctgtgtaacgagccagaagagaagattccattgatcaaggtctctgatgccaagcaattgggtgaatgggctggtctttgtactttggacagagagggtaacgccagaaaggttgttggtgcctcttgtgtcgttatcaaggactggggtcaagattctgaggagagacacgttttgttggattacttctcttccaactaa

SEQ ID NO: 3493 - DNA, 2271 bp, Artificial Sequence
  Optimized genes for Pichia pastoris
atggttaatgttaagtttgaagattacagttcccttttggagtccttggatcagaacatcgaccaggccaacagaagagaggatccatttgccaaacaaatgcaaggtgtcaaaccacgtttgagtacaatgtcatactcttcagctggtagctacaccccagattcctcccctgatatgatcttcaaccaggagcaatacaacgagaatcaattcaacgagaatatgtttaacaacgacttgtactcaactttatctgagctgccagagttgtcaaacatgtccagttcaatgtctggaacttccgagaacaactctcctcactccactgagcttaatgatcttggtatgttgaacggtattaactttggttcctctgctgacaccaataacacagttggatcttccgtcaataccactattggtgaccaagtcttgttgccagttgttgacatggaaagaaacgatgctatcgcagcttccgctgctcaccaatctatcaaagactccaaggttgctaagccaagaaagaaaatgaagtcttctcacaacctcattgagaagaagtaccgtaccaacatcaattctaagattctggaactgcgtaactgtgttccaactttgagaattgttatttctagaaatggaggtggaaactccggtgatgagttctccaaggactacgagggattgggttactcggatgatgaatccaagttggacggtctgcaaccagccagaaaattgaataaggctaccattttagccaagtcagttgaatacatcaagcacttggagtacagaaactctttgctgaccaccgaaaatgagaaattaaaggagattattcaaaactcaggtgctgccactgactcaggctctggtaacatgatgaacaagttgatcattggatcacttgcttgtttggccggtggtagtactcttaatgacatgagtaatgattctcgttctttgatgaccatgccaatttttattttcaattccaatgaaactactctggctttgaagcctttgctaggtatcgtcaagggtttcttggccatttacgtcctgtacctggtcattgctccattgttccactcttcgactgtttgtatcgaaaaggacgagaagaccatcgctaacgaaaacaatgagtcacctgactggccacagggtaagcaaggaggattcttctctttattggtgaatattgctacttctggtctttctgtcgctcttaaccgtgacccatacgccccaatgatgcaggctttctacttcaagcagttgtcattgtatggtaatggttcttctcttgcctcttacattgccgcttcatactggagatgtgctagacaatccaggaaccaaattccagctactgattccaaatctcagtacttgcttgagaacttcgagtatgctcaagtgtttgagatcaagtccatgaacaccttgttggcaaagtatcctaacttgaaactgaacagaacccacttcgttgagcaagtttctaaattattgtgtgatagtttgttagaaaactgcattcacaagatgattgaattggaagctctgaaacttcaaaagaaggaacaattggctgctgatgacactgaacaggaagagcaaaccgagagaactatctctgaattccaagagcagagagatcaatatttgaagcatgcttctcaactgtcttctactaatgaacaattactcaagtgcaagctgattaagtgtatgattgacacatctttggaaaatttgcaagaatgtggtagactgatccaaactttcacctccaacaaactatcaaaggatctggttgcctgtttcacttgttgtattatctgtgccttgtccgaaggttctccatctattgaacaggttaacctgttcattgacagattgaaccttccaaactacactaacgtttacgttaaaaacactaaagtttcactactgctgtatgtctctctgttgactatggtcaacagtttaccagactccacttactcccaaagatttgttcaagttgattctgattcagatgaggaagacgctttagactctgactctgttggttcaggatcctacgacaaccatttggtcagagacaagttgaccaacattttgtctaacttgcgtatcatcactggtactccaaagagcaagaacgatttggctattattgagtctaccacactgaagtccatcttgattgatggtttggtttccagaatcaacttacttgaccacgcttaa

SEQ ID NO: 3494 - DNA, 333 bp, Artificial Sequence
  Optimized genes for Pichia pastoris
atgccagctccatacgagaagggttctgaaaagaaaggtgctactttgttcaagaccagatgtttgcaatgtcacactgttgaggctggtggaccacacaaggttggtccaaacttgcacggtgtttttggtagaaaatctggtcttgctgaaggttactcttacactgatgctaacaagagaaagggagttgaatggtctgagcaaaccatgtctgactacttggagaacccaaagaagtacattccaggtaccaagatggctttcggtggtttgaagaaggccaaggacagaaacgatttgatcacttacttggctaaggctaccaaataa

SEQ ID NO: 3495 - DNA, 1506 bp, Artificial Sequence
  Optimized genes for Pichia pastoris
atgacttttgctccacctttagagtttgagattgacttgccaaacggtttgaagtacacccagccactgggtttgttcatcaacaatgaatttgttgaaggtgttgagggaaaattgcttccagtcattaatccatgtgacgagactaagatcacccaagtctgggaagcctctgctgccgacgtcgacagagctgtcgatgccgccgaagacgctttcaataactctgtatgggccactcaagatccattggaaagaggaaagttgatgaacaagctggcagatttgattgatagagacttcaacatcttggccggtattgagtctattgacaatggtaaagcctacacttccgctcaaggtgatgttactttagctgttaactacattagatcttgtgccggatgggctgacaagattctgggaaatgttgttgactctggtaacactcacttgaaccttgtgaagagagagccattaggtgtcgtcggtcaaattattccatggaacttcccactactgatgttggcttggaagcttggtcctgctcttgctaccggtaatactgttgttttgaaaactgctgaatccactcctttgtcaggattgtacgttgccaagttaattaaggaagctggtttccctccaggagttgtcaacattttgtctggatttggaaacccagctggtgccgctattgcagctcatccaagaatcaaaaaaattgccttcactggatctactgccaccggaagaaagatcatggaggccgctgctaagtccaacctgaagaaggtcactttggagttgggtggtaagtctcctaacattgtttttgaagatgctgatatccaaaagactatccacaatatcattttgggtatcttcttcaactccggtgaagtttgttgtgctggttctagagtttacattcaagacactgtctacgaggaggttctggaggctttcaagaaagaaactgataacgttaaggttggtggaccatttgaagaaggtgttttccaaggacctcaaacttctgaattgcaattgaaccgtattctttcttacatcaagcacggtaaggatgagggtgctagagtcatcactggtggttccagatacagaaacagaggttactacatcaagccaaccattttcgccgatgtcactgaggacatgaagattgtcaaggaggaaatttttggtccagttgtgactattaccaagttctctaccgttgatgaagtcgttggctacgccaacaacaccaattacggtctggctgctggaattcacaccaacaacttgaataaggctatcgacgttgcttctcgtatcaaggccggtgtggtttggattaacacttacaacgatttccaccacatggttccattcggtggatacggagaaagcggtattggtagagaattgggagctgaggctttggacaactatacacaagctaaagccatcagaattgcttacactccagagcacaaataa

SEQ ID NO: 3496 - DNA, 1179 bp, Artificial Sequence
  Optimized genes for Pichia pastoris
atgatttctttccaaccatcttattacgtctctactcctgctctgttgtctccttccagacatgagtatggttaccaatcctccgctgtcactccatgtttctttgagaacaacttggacactgttttgtcagctcttcagagacacaactacacttctccacctcctccaaaaattaagcctactgaagatcaaagatcttactacgttaagatgtccaagaagtccggtgacttttctgactacggtgttaaggtctaccaggaccaaaagttcacccacgtctgggtttactccacttccgataacgtcaagcgtcacttcaagtacccaaactccgccgtccaatacgagggtattagagccaaggttgctagaaacggtagattcttgttgattcaaattccaaagatctctagacctgatgtcgtcttgaacattgttcaaaaaagattgcagtccattgctaaccaggagagaaaggagcgtgaggaattggaaagaagagaacttcaacgtaaggccgctatggaacgtaacagacgtttgagagctttggaggagcaacaattggctgctcaaagagagtactttgaaaagtctttgcaatctgctttctcaccattcttcacttacagactggaatcaaagcagaaggatgaacaagagtccaacgctgagtctgccaccaaccaagttactgctaagccaaatgtcatcagaatcccagtcaaccacgttgatgagtcaaatgaagttattccaaccaaggctccaaaggcttctaagactgacgttgaagaacagccaaacgttaacgatgttgagaaggaagctgacatgcaagatgtggaagaaaaccctaacactcaggatgctgaatatgaaactgagcagttctccgacttcgaaggtttctctgatgatggtgatatcgaggaggctattgagccaatggatgaagacgaggaggattctgacaactctcaattcatggaggaaccagagattttgaagagaagaccatccccatactctatttccttcccagctactttgagtgccgaatcttcctctaccaaagctcctaagatcaagaaaccaaacaagattcctattgaagaggtcgaggacgaagagtttaagagattttcatcttcttcagacaatgactcttag

SEQ ID NO: 3497 - DNA, 1230 bp, Artificial Sequence
  Optimized genes for Pichia pastoris
atgtctcaaggtactttgttcatcaccgagcaaactcgtggtgttgttccaaagggtttggtccaatactttaagttggacgtcaagatttctaacaaggaagacgaacaattcaaaaaatacttcccattgaactacattccagctttcgtcggtcctaaaggtctgaagctgacagaggtttctgctgttattgagcacttgctgaaccttgctggtgaaaaaaagttgaagggaactacagaattggaacaagttcaagtcaacaaatggatctctttcttcaacactgaggtcatctccacttcagctagaatcttcttgcctttgttgggtaaggccccatacaataagaaggacattgacgctgctactgaaagactggacactattattcaaatcattgaagctcgtctgtctgagttcacctacttggttggtgagagaattaccgtcgctgacttgtttgctgccactgtcattggtagatctttggagaccatttttgacaaggcttggatttccaagcatcaagatattttcagatggttctctactgtttccgctcatccagtcttgtcttggagatatgttgacttcaagccaagagataagcctgttgagtacgttcctcctaagaaggaaaagaaagagaagaagaaggaggagaagcccaagcaagagaagaaacctgctcctgccgctgctgaacagtctgacgagccaccagttgaaaaaaaagccaagcacccattagaggctttgggaaagccaaagttggctattgatgaatggaagagattctactccaacgaagagactagagagtctgccatcccatggttttgggaacactttgatgctgatgaatggtctttgtggaaggttacttacaagtacaacgatgagttgacccttactttcatgtcaaacaacttgatcggtggtttttttgccagattgactggttctatcaagtacatgtttggttgtgctgtcgtttacggtgagaacaacaataacggtatcatcggaggtttcatggttagaggtcaagactacaaaccagcctttgaagttgctccagactgggagtcatactcttacgagaaattggatccaaactctgaagaagatagagaattctttaacaacatgttggcctgggacaaaccaattgttgtcaatggagaggaaaaggagattgctgatggtaaagttttgaaataa

SEQ ID NO: 3498 - DNA, 1167 bp, Artificial Sequence
  Optimized genes for Pichia pastoris
atgtctcaccgtaagttcgaggctccaagacacggatctttgggtttcttgcctaagaaacgtgcttcttctcctagagcaagatgtaaggccttcccaaaggatgacaagtccaagccagttgctttgaccgctttcatgggttacaaggctggtatgtccaccattgtcagagacttggatagacctggttctaagatgcacaagagagaagttgttgaagctgtctctattgttgatactcctcctttggtcgtcgttggtgttgtcggatacgttgagaccacttctggtttgaagtctttgactactgtttgggccgagcacctgtctgatgatgtcagaagacgtttctacaagaactggtacaaatccaagaaggttgccttttccaaatactctgccaagtatgctaacgacccagccagtattgagactgaattggccagaattaagaagtacgcttccgttgtaagagttttggttcacacccaaattagaaaaaccccattgaaccaaaagagagctcacttggctgagattcaaatcaatggtggttcaatttctgagaaggtggactgggctagagatcactttgaacagactattgccgttgacaccgttttcgaacaaaacgagaacattgatgttattgctgttaccaaaggtcacggttttgagggtgtcactcatagatggggtactaagaagttgccaagaaagacccacagaggtctgagaaaggtcgcttgtattggtgcttggcatcctgctcatgttatgtggactgtcgccagagccggtcaaaatggattccaccacagaacttccatcaaccataagatttacagagtcggtaagggtgacgatgagtccaacggttccactgagtacgacagaaccaagaagactgttactccccttggtggatttgttagatacggtgagatcagaaacgatttcgtcatgatcaagggatccattccaggtccagtcaagcgtgttgtgaccttgagaaagtcattgtacactcaaacctccagaaaagctaccgagcaagtcaccctgaaatggattgacactgcttcaaagtttggtaaaggaagattccaaactccagctgaaaaggctgcttttttgggaactttgaaaaaagatttgcagtag

SEQ ID NO: 3499 - DNA, 1230 bp, Artificial Sequence
  Optimized genes for Pichia pastoris
atgttgactaaagttatttccttggctattttgaccgcttctgcttttgctgactctggagaattcactttgtggaacctttctccaggtgatccatacgactccactttctggggtgtctctgagggattgattgtcccagttgaaccaggagtaacttttgttatcaccgatgatttgcaattgaagactactgatgaccaattcgttaccgttggtgaagattccgctcttggtttgggagctgaaggttctgttgagttctctatcatcaacgaggatggaattacttctttgtactacaacggtgagttggttacggcttacatctgtgagggtgctgagcctcaaatttacttgacaggatccgaagaggacccagaatgtgtttcttacactgttgctgttattggtgttgatggtgaggctcctcctaccttcccagaagaagacgatgaaactaccaccactgacgaccctactgatgagccaaccgatgagccaacagatgagcctactgatgaacccactgacgaaccaaccgacgaaccaactgacgagcccactgatgaacctacggacgagcccacagatgagcctaccgatgaaccgacagacgagccgaccgacgagccaactgatgagccaacggatgaacctacagacgagccaaccgaggaacctacagaagagcctactgaggagccaactgacgaaccaaccccacctcctccacactggggtaacgaaaccgtcactgctaccaaaactgagtacgagactacaaaggtcactatcacttcctgcgaggagaccaagtgttacgaaacaacctctgatgcttgggtttcaacttgtactaccgaaattggaggtaaggttactaagattgttacatggtgtccaattccatccacccctggtcctaagccaccaaagcctaccaagccaactgaaacgaaaccaactactgttccagctcccacgaccaagaagccagagactccaacaactaagaaacctgaaactcctgctccagaaaagcctgagaagaccaccactgtcattcctcccccaaccacagagaaaccatctaccttgtctacttcatctgtgactggatctgtcaccattcccaccatcacagctactggtggagctggttccaacttcaacttgggtggtcttactgtcggtgttgccggtattgctatggctttgttcgtctaa

SEQ ID NO: 3500 - DNA, 192 bp, Artificial Sequence
  Optimized genes for Pichia pastoris
atgtccagacaaggtggtaaggccaaaccattgaagaagccaaagaagaagactcaagagtttgatgaggaagatttggctttcaaggctaagatgaaggctgatgctgctgccaagaaagctatggctgagaaggcttccaagggtggtcctttgattggtggaggtatcaagaagtctggtaaaaaataa

SEQ ID NO: 3501 - DNA, 354 bp, Artificial Sequence
  Optimized genes for Pichia pastoris
atggcttctgctggtttgaatgatgttgttaccagagagtacactatcaacttgcacaagcgtttgttcggtgtccaattcaagaaaagagctccaaaggctgtcaaggagattaagaagtttgccaagcttcatatgggtactgaggacgtcagattggaccctaagttgaacatggccgtttggaagagaggtatcaagggtgttccattcagaatgagactgagaatttccagaaagagaaacgaggatgaagatgctaagtacaagctgttctcttacgttgagccagtcaacgtcccaactgttaagggattggagaccgttgtcattgaagaagacgatgaggaatag

SEQ ID NO: 3502 - DNA, 1089 bp, Artificial Sequence
  Optimized genes for Pichia pastoris
atggctaaatctagcaaggtttcttccaagtccgctgccaaagcttcaaagggagagaagaagtctaagaagcaagagtcctcctcttccgaatcttcttctggttcttcgagtgagtcatccggatctgagtccgaatctgaagaggaatccgtcaaggagtccaagaaagaagccaactcatcagaatccgagagcgagtctgagtcggagagtgaggctgagtctgacaaaaaagaggaagctgctgagtcaggatccgagtctgagtctgaaagcgaatctgaaagtgaaaaggaagacgagaaatccgccaagcgttctgctgaagaatcagaggaggagccagctaagaaagccaagaccgaagagatcaccactttatttgttggaagactgtcttggtctattgacgatgaatggttgaagaaggagtttgagcacattggtggtgttgttggtgctagagtcatgatggagagagctactggtaggtctcgtggttatggttacgttgactttgacaacaaggcctctgccgagaaggctctggaagaaatgcaaggtaaggaaattgatggtagaccaatcaacgtcgacatgtctaactccaaaccagcagccccagccgccagaaacaacgatagagcctctcaatacggtgacaagagatccccaccttctgatactcttttcttgggtaacttgtctttccaagctgatagagacactttgtttgaattgttctccaagcacggtaacgttacttctgtcagaattccaactcatccagaaactgagcaaccaaagggttttggatacgtccaattctcttcagtcgatgaggccactggagctttggaggcattgaacggtgagtatgttgataacagacctatcagattggactactctactccaagagatccatctgcttctggtggtcgtggtggcagaggtggacgtggaggtagaggtggtttcagaggtggaagaggaggattttctggagacagatcttttggttccggtgccaattcagctccagtcaactctggattccagggtcaaaagaagactttcaactaa

SEQ ID NO: 3503 - DNA, 915 bp, Artificial Sequence
  Optimized genes for Pichia pastoris
atggctgacaacaacaagtctaacttcttcgttgacttcatgatgggtggtgtctctgctgccgtttctaagactgctgcagctccaattgaaagagttaagttgttgattcaaaaccaagatgagatgttgaagcaaggtagattggccaaaaagtatgatggaattgctgaatgtttcaagagaaccgctgctgatgaaggtatcgcttcattctggagaggaaacactgccaacgttatcagatacttcccaactcaggctttgaactttgccttcaaagacaagtttaaggctatgttcggtttcaagaaggacgaaggttggtggaagtggttggctggtaacttggcttctggaggtttagccggtgccacttccctgttctttgtttattctttggattacgccagaactagactggccaatgatgccaaggcctccaagggatccggtgagagacaattcaacggattgatcgatgtttacaagaaaactttggctactgatggtattgctggtctttaccgtggttttttgccatctgttgttggtatcgttgtctacagaggtttgtactttggactgtacgactctctgaagcctattgttttggtcggtcctttggagggttccttccttgcctctttcttgttgggatggactgtcaccactggtgcttccactgcatcttacccattggacactgttagaagaagaatgatgatgacttctggtcaagctgtcaagtacaacggtgcatttgatgctttcagaaagattgtcgctgctgagggaatcaagtccttgttcaagggttgtggtgctaacattttgagaggtgttgctggagctggagtcatttccatgtacgatcaattgcaaatgatcatgtttggtaagaagttcaaataa

SEQ ID NO: 3504 - DNA, 849 bp, Artificial Sequence
  Optimized genes for Pichia pastoris
atggctagaggtccaaagaagcatttgaagagacttgctgctccttctcactggatgttggacaagctttctggtacttacgctccaagaccatctccaggtcctcacaagctgagagaatctttgccattgattgttttcttgagaaacagactgaagtacgccttgaacggtcgtgaggttaaggctattttgatgcaacgtcacgttcaagttgatggaaaggtcagaactgatgccactttcccagctggtttcatggatgttatcactttggaagctaccaacgaaaacttcagattggtttacgatgtcaagggtagatttgctgttcacagaatcaccgatgaagaggccacctacaagttgggtaaggttaagaaagttcagctgggtaagaagggtattccatacttggtcactcacgatggtagaaccatcagatacccagacccagatattaaggtcaacgattctatcaagattgacttggctactggtaagatcctggattttgttaagtttgacgtcggtaaactggttatggttaccggtggacgtaacttgggaagagttggtgttattactcatagagagaagcacgaaggtggttttgatttggtccacatcaaggatgctttggagaaccaattcgtcaccagactatccaacgtcttcatcattggtgaagccaacgctccaattatttccttgcctaagggaaaaggtatcaaattgtccattgctgaggagagagaccaaagaagacaacagcaaggtttggatgttgaagctgaagaagaagttgaggaagaggctgacgttgactctgaggtcgactttgagtaa

SEQ ID NO: 3505 - DNA, 1218 bp, Artificial Sequence
  Optimized genes for Pichia pastoris
atgcaaactttcgtcaagagatctatcagaaacattcctaagatggctaccagtgctcatcagaactttgctaagtacttggccaccgatcatatggcatctgacttggttccattggatgcttccaaattgcaagttactagaactactcaaccaaagtccaagctgcccaaggagaaactggtttttggtcaatccttcactgatcacatgttgaccgttgagtttgatcaagcttctggatggggtactccagaaatcaagccatacggaccattatctctggatccatctgcttgtgttttccactatgcttttgagttgtttgaaggtatgaaggcttacaaggactcccaaggtaagattagattgttcagaccagacatgaacatggccagattcaacaagtctgccgcaagaatttgtttgccaactgtcgacggtgaggaactgatcaaattgatctctgagctgttgaagttggaccaatctttcgttccagagggtgaaggatactctctttacattagacctactttgattggaacttcttccggtttgggagtcggtgctcctgataaggctttgttgtacgtcatctgttctccagttggtccttactatccaaccggttacaaagccatttctttggaagctactgactatgccactagagcttggccaggtggtgttggtgacaagaaattgggtgccaactacgctccatgtatcaagcctcaattgtccgctgccaagaacggtcaccaacaaaacttgtggttgtttggagaagagaagttcattactgaggttggaaccatgaatgtcttctttgttttcaagaacgctgatactggtaagaaggaattggtcaccgctccacttgatggtaccattttggagggagttaccagagattccattctgaagttggctagagacagactggacccaaacgaatgggaagtcaacgagagatactacactgcccatgaagttgctgaaaaagctgagaacggtttactggtcgaggctttcggttctggtactgctgctgttgttgccccaattaagaatattgccttcaatggtaaagactacgatgttcctttggtcccaggagagcaatacggtgaaatggctaagactgttgcagactggattgctgacattcaatatggtgtcgttgactctgaatggtccagagttatcaactaa

SEQ ID NO: 3506 - DNA, 345 bp, Artificial Sequence
  Optimized genes for Pichia pastoris
atgggtttgggtaacttctggttggagagaaacattaccaacaagcacttggtcagatcttccaactttgctgaagacagaactcaaagattgaaagaagctaagttggatgctgctaaggacatcaaggaatacaagcaaaagaaagagaaggagttgaaggagcacgaggctcaattctctggttctaacgatgacttggaaaaggctgccgagtctgaagttcaaactgagctggttgagattgacaagtctgctgaggccaagaaggaagatgttgtcaagctgttgttggacgctatcactcatccaaagccagaattgcacgtcaacgctagagcttaa

SEQ ID NO: 3507 - DNA, 309 bp, Artificial Sequence
  Optimized genes for Pichia pastoris
atggttcaagagatcaactctgctgaggagtttgacaaggctattgcctctggtgttgtcttggttgacttctttgctacttggtgtggtccatgtaagatgattgctccagttttggacaagttctccaaggagtacgagcaagttaccttctacaaggtcgatgttgataagctgtctgaagttgctgccagatttgagatttctgccatgccaactttcttgttcttccaaaacggtgaggttgtttctaaggttactggtgccaacgctgctgccatcaagcaaactatcaccaagttgatctaa

SEQ ID NO: 3508 - DNA, 1779 bp, Artificial Sequence
  Optimized genes for Pichia pastoris
atgaagaatttcttcaactcttctgactctgaaaagcatgaagaaaaagtcaacgacgagaaggttcaatccatttcatactctcaatctattctttcattgccagatttggacccaactctttctagacacgcttctgagtacgaagctgatctttccaagatccaaccaggtgtggccggagagaagggtcaccaactgaagagagatttaaaggccagacatatctccatgattgcattgggtggatccttaggaactggtctgttgatcggtactgccaactcactagctactgctggtccaggatctgtcttcataacttattccttcgtcggtttgatggttttctttgttatgtctgcccttggtgaaatggccacttacattcctttggccggtggtttcactggatactcagaccgttatgctcatccagctttgggatttgccgttggttactcttacctggctaagtacttgattgttactccaaaccaattggttgctggttctctggtcatgcaatactgggtttctcctgagaaagttaaccctggtgtttggatcaccattttcttggtctctgtggttttgatcaatttgtttggtgtcaagtttttcggtgagttggagttctggttaagctctttgaaggtcatcactgtcttgggtcttattattatgttgttcgtatttatgcttggaggtggtcctgatcatgagcgtctgggattcagatattggactaacccaggtgctttcgccccatggaagggaattgcttctatccctaaggctaaatttattgcctttgtctcctctttcgtttacgctgtttttgcttattctggtaccgaattggtgggagttgttgtggctgaggcttccagaccaagaagaaacgttcctcgtgctatcaaattgactttctaccgtatttgtgtcttttacatcttgtctgttcttttgctgggttgttgtgttgcctacaacgatgccgagcttgtcgctgctagagccaagtctacttcttcatctgcatctccattcgttgtcgccatcaacgcccaaggtatctctggattgcctcatctgatgaatgcctgtattttgatctttgtgttctccgcatgtaactccgacttgtatattgctaccagaactctgtacggtctatccgtccaaagaaaggctccaaagattctgtcaagaaccaacaagactggtgttccatatttgtccttggctgtcgccttctgtttttcttgtcttgcttacatggcttgttcttccggttccgccagtatcttcggctactttgttaatgtcgtttccatcatgggtttattgacatggatttctctgttaatcactcacatctgtttcatgaacgctatgaaagcccagggtatcccaagaaaatcccttccatacagagctcctttccaaccttacgcctcttggattactttgttcttttgtatcctggttgctctgatcaagaacttcaccgtgtttttgaacggttttaactacaaagatttcatcacaggttacattggtattccatactacttcatttgcttttttggatacaagttcattaccggtgccaagcgtcacaaatctgctgaagttgacttgttgacccacaaggacgttattgacgctgaagaggaggaatatgcatttgcagaggccgaactgaaagctgagagaggtaacaagaaggatgctcaatggttgtacgacagaattttcggatggattttttag

SEQ ID NO: 3509 - DNA, 408 bp, Artificial Sequence
  Optimized genes for Pichia pastoris
atgtctgacgccgttaccatcagaaccagaaaagttatcaagaacccattgttggccagaattcaattcgtcattgatgttcaccacccaggtaaagccaacgtttccaaggatgagttgagagagagactggctgaaatttacaaggccgacaaggacgctgtttctgttttcggtttcagaactcacttcggaggtggtaagtcttctggatttggattggtttaccaatctgtctctgatgctaaaagatttgagccaacttacagattgattagatacggtttggctcagaaggttgaaaagccatccagacaacaaagaaagcaaaagaaaaacagagataagaagatttttggtactcaagagaagtttgctaagaaggctgccaagagagctgctgagtaa

SEQ ID NO: 3510 - DNA, 1329 bp, Artificial Sequence
  Optimized genes for Pichia pastoris
atgccatcccactttgacactttgcaattgcacgctggtcaaactgctgaggctcctcacaatgctagagctgtcccaatttatgctacttcctcttatgttttcagagattctgaacatggcgccaagctgtttggtcttgaagaacctggttacatttactctcgtttgatgaaccctactcaaaacgtctttgaggaaagaatcgctgcattagaaggtggtgccgctgctcttgccgttggatctggacaagcagctcaatttttggccattgccggtttagcccacactggagacaacgttatttctacctctttcttgtacggtggaacttacaaccagttcaaggttgcctttaagagactgggtattgaatccagatttgttcatggtgacgatccagcagagttcgagagattgattgacgacaagaccaaggctatctacgttgagtctatcggtaacccaaagtacaacattccagactttgaagctttagctgaacttgctcacaagcacggtatcccattggttgttgataatactttcggtgctggtggttactacgtcagacctattgagctgggagctgacattgttactcactccactactaaatggattaatggacacggaaacaccattggaggtgttgtcgttgactccggtaagttcccatggaaggactacccagaaaagtatcctcaattctccaagccttctgagggataccacggtttgatcttgaacgatgctttcggacctgctgccttcattggtcacttgagaactgagttgttgagagacttgggtccagcctcttccccatttggcaacttcctgaacatcatcggattggagactttatccctgagagccgagcgtcatgctgagaacgctttgaagttagccaaatacttggaaacttctccatacgtgtcttgggtttcctatccaggtctggaatctcatgactatcatgaggctgctaagaagtacctgaagaacggtttcggtgctgttttgtcttttggagtcaaggatcatggaaagccagctttgactccattcgaagaggcaggtcctaaggtcgtcgactctttgaaagttttttccaacttggccaatgtcggtgattcaaagtctctgatcattgctccatattacactacccaccaacaactgtctcacgaggagaagttggcttctggtgtcaccaaagattccatcagagtttctgttggtactgaatttattgatgatttgattgctgatctggagcaagcttttgctctggtttacgaggaggccaacactaagctttga

SEQ ID NO: 3511 - DNA, 3051 bp, Artificial Sequence
  Optimized genes for Pichia pastoris
atgttgaacagagtgcttttggtcgctttatcttgtgttgtgtttttccacttggttacaacctttcctgttggtacctcttctgattcgttgcaaatcagaaacttattgtctcacaatttcacccgtgccaacatttctgaaggattatcatcaggagctacctacttcgttgacgaggatactgaaacttactacgacaaggaactgaaagtgttgagaactactagattcccaagatacaacaattaccagttgcagccttacgtcgccaatggctatattggttctagaatccctagagttggatctggattcacttacgacacttccgacaacaagacttccgagaacttgaaaaatggatggccattgttcaacaaaagatattcaggtgccttcatcgctggtttcttcaactcccaaccaacagtcccagagaccaacttcgaagagttggagaaggacggttatgaatctatcattgcttctattccacaatggacttctttggaattgaccgtcaacgtcaacggaacaaaccagacattgaaggctgatgatgtggatatcacccacatctctgactattcgcaacaactgtctcttcttgatggtatcgttaccactaactatacctggttgggtttagtgaatgtttccatttccgttctggcccaccgtgatattgtctctttaggatttgtgtctctggagctttcctcccagaagaacattaccgtttcggttactgacattctggattttgctacaagtactagatgttcctacctggactctggtgtcaatgagcagtctatctttatgaaggtccaaccatccaacgttccaaccaatgcaaccatttactccagcttaatgtcatctaactctacctccagtttgctgaagcagaaccaaactgtttctcagactcttcgtgttaacctttctaagaaccaagctgccagtttccaaaagtacgttggtgttgtctcagacgattacttggatagtattgagactaatttgacttcatatcaattcgccagagaaaccgccaagtttgccgagatcaagggaagatcttggattcttaaatcccacaaagaggcttggaacgagctgttgaatggtaaatctattgtttttcatgataacgacttcttgaccttggcttccgattcttccatctaccacctgatggctaacactcgttccgaagctaatggtggcacatccgctctgggtgtttctggtttgagttcagattcatacggaggaatggttttctgggatacagacttttggatgcttccatctgtccaggctttctctccaagacatgccgtctccttgtccaagttcagagaccacacccatgaccaagctaagaagaatgctcagaccagagacatgaacggtgctgtctatccatggaccagtggtagatttggaaactgcacctcaacaggtccttgttacgattatgagtaccatattaatattgacattgccttcatgttctggaaactgtaccttggtggtgctattgatgatgactacatgaaagaattcggttacccaatcatcgaagatgttgcttcattctttgttgactacgtggactacaattcaactttggacaaatacactaccagaaatcttactgatcctgatgaatatgcagagttcaagaacaacgctgcttttacaaatgtcggtatttcacaattgatgaagtgggctttgatcttgggaaagcacttaaaggttggtaatgaaagaagttatgataaatgggaagatatcatgaccaagatgtacttaccagttaaccacgctggagatgtcaccctggaatacaccggtatgaacaactcaattgaagttaaacaggcagatgttgttttaatctcctatcctcttgacgacgaggacggagcattgcaagagtattttgattatgacgaagacagagccattagtgacgtcagatactattctgacaagcaaaccgatgaaggtccagccatgactttttctgtttactctgctgttaatgccaaatttaacaaggaaggttgctcctctcaaacttatttgttgaagtcagttgagccatactttcgtttcccttttggtcaaatgtctgagcaatccacagatcaatacgacaccaacggtggaactcaccctgctttcccattcctgactggtcacggtgcatttttacaatcttcaatctacggtttgactggactgagattctcttacatttataatgacactgataagtccattaagagaagattggcctttgaccctctgcagctgccatgtttgcctggaggtttttccatcaacggtttcgtctacatgaatcaaaccttagacatcactgtgaacgatacctatgctactattgctcacagaggtaacgccaccaccatcaacgtttatgttgattccagaaacgaaatgggtggtaaggagcacaagattcaacctggtaagtctttgtcaattcctttgtaccaaacagaacaaaacatcccaggttccttcattgaatgtactgtcaagaatgtgactgctcttcagccaggtgtggtgggtgacccaattcaggccgttgccgatggagacaattccactatctggaagatcgagtcaagagaggaaccaactcatttgattttcgacttgggtgatgagttggatattgagggtggtctggtcgtttggggtacttacccagctgagtctttctccgtcagtgttctaagagatttcaattctactaactacagagtcatcaataacgttgaaaactacgatttgatatacgagtccggtaacgtcactgcatcttctcctttcgatgagtctcatatcaagaaagttcaaattttgccacacaactgtaccaactttactttcagtgaacttactgcctctcgttacgttttgtttgagtttaccgacgttcttggataccctcaagattactcttatggtgctcaagttgctgaagtcgtcttgtattaa

SEQ ID NO: 3512 - DNA, 438 bp, Artificial Sequence
  Optimized genes for Pichia pastoris
atgggtaaaggtaagccaagaggtttgaatgctgctagaaagttgagagtccacagaagaaacaacagatgggctgatttgcaatacaagtctaagctgttgggtactgctttcaagtcctctccattcggtggttcttctcatgctaagggaattgtcttggaaaagattggtattgcttccaagcaaccaaactctgctatcagaaaatgtgtcagagttcaattgatcaagaacggtaagaaggtcactgccttcgttcctaacgatggttgtttgaactttgttgacgagaatgatgaagttttgttggctggtttcggaaagcgtggtaaggccaagggtgacattccaggtgttagattcaaagttgtcaaggtttctggtgtctctcttttgtctttgtggaaggagaagagagagaaaccacgttcctaa

SEQ ID NO: 3513 - DNA, 1035 bp, Artificial Sequence
  Optimized genes for Pichia pastoris
atggacattgaggctgagccatctctgagatctattgttaaccatgaatctttaaaatggattttcgttggtggaaagggtggtgtcggtaagactaccacttcctcttcaatttctatccaattggctttgcacaatccaaataagaaatacttgttgatctccactgacccagctcacaacctgtctgatgccttcaaccaaaagttcggtaaagatgctagacaggttgaaggtcttccaaacttgtcttgtatggagattgaccctgactctaccctggaaaaccttcagaagaacaacgagtctactttcggatctgctggtggtaacgatccattgaaatccatgatgggtgacatcactggatccattccaggtattgatgaagctttctctttcatggaagttttgaagcacattggtgagaccaaggagaaccaaatcaagtacgacactgttatttttgacaccgctccaactggtcacactttgagattcttgcaactgccatcaactcttgagaagttgctgggtaaggttaatgaactttccggtagatttggtccaatgttgaacaatcttttgggttctcaaggtggtcaatctatcgactttgcttctaagattaaggaaattcaagttcaagtcactgaagtcaacaagcaattccaagatcctgagttgactacttttgtttgtgtttgcatttccgagttcctttctttgtacgagactgagagattgattcaggaattgatgtcttacaacatggatgtcaattccatcgttatcaaccagctgttgttttctgacgattctgagtgcagaagatgtaatgccagatggagaatgcaaaagaagtatttggaccaaatggatgagctttatgaagactaccacttggtcaagatgccattacttgctatggaggtcagaggtttggagaatctgaagaagttttccaagtacctgattgaaccatacaattctgaaactgatggtcatgttgttttcgacttggaagaacagtag

SEQ ID NO: 3514 - DNA, 321 bp, Artificial Sequence
  Optimized genes for Pichia pastoris
atggctactgaaactgctctgtcttacgctgcattgattttggctgactctgaaattgagatttcctctgacaaccttttggccttgaccaccaaggccgatgtcaaggttgacaagatttacgccgacctgttctccaaggctttggatggtaagaacttgaaggacttgttcttcaacatttcttctgctccagcttctggtgctgccgctggtggtgccgctgcttcctccgctgatgctgaggaggctgctgaagagaaggaggaagaagctaaggaagagtctgatgatgacatgggtttcggtttgtttgattag

SEQ ID NO: 3515 - DNA, 444 bp, Artificial Sequence
  Optimized genes for Pichia pastoris
atgtctcaagaggctaagtcagtgcaatctgttcaaacttttggtaagaaaaaatctgctactgctgttgctcacgtcaagcaaggttccggattgatcaaggtcaacggttctccaattaccttggtccaaccagagattttgagacacaaggtctacgagccattgctgttggttggtttggacaagtttgccaacattgacatcagaattaaggttactggtggaggtcacgtttcccaagtttacgctattagacaagctttggccaagggtctgatcgcttacactcaaaaatttgttgatgagtctaccaagaacgaattgaagaagattttccaatcctacgacagaactttgttgattgctgattccagaagaaaggaaccaaagaagttcggtggtagaggtgccagagctagatttcaaaagtcttaccgttaa

SEQ ID NO: 3516 - DNA, 5937 bp, Artificial Sequence
  Optimized genes for Pichia pastoris
atgagtttcaagcagtctttgttgtctcaaaccccatcttctataactccatcacaattcttggctgacttaatcagccaacactcaaatgaacaaaagaatgttcttgcactgttgttcgcagaaattcttgtaccaggatcccaacacatttcaagttcaacttcaactaaaactacagctttgactccaagtaccttgcctgaagctactgctcgtggttcccagtttcgttctttgctgaagggtttaaacattgaacagtcaacatgggatcaaatcattgagttgatctttgaaactgacgattacttttcagatgcaacttctatctctcaggttaccgttgccagtatctcacaatttttggcttctttggagcccgagaacattgacaagttcttaagatatgtcgctcaccacaagctcaaggatcaccctttcctttttcagaagaacttgttggtgtcattgtactctctgaatccccaacatggtgctatagaccttttgtcgtgtccactgcaacctgttctggctaacgagccaaactccagaagaaccatcatctggttcaagtatattgctgagttggaagtttctctacttgtggaattgaaatctagaccagctacagcagacgagaatcagatcaacgagattattgaagactcctacaaaaccgctccagaatacttaggactggctgcccttcatctttggaaggaaaacaaggacaacaacgccgacccaggtaccactttggcatatttgaacctgtgtcatcactttatcgtccaactactggacattaactctccatacttgatcatccttctgactgagttcaaagagatatccgaagatgaactttccagtcttttggccaactatgtttcccttcgtcctaatggagctatcacagtggctacctacgctctaagagatggtgtcttatcatccgtcctaaataagctttctaagttcaacgactgtctttcagttgccattgaggcaagcaacttgggttggaacggtctcgaaaagtttgttcagaatctattgagtaacaatccaaagcaagtacagtcccaattagtcgactttcttgaggagcaatcttcgtttgagtatcaatcctctaacaacgaatctaatgctcagatcaagtctcacagatcattgtccattccagtggtctacaccttattgaaggccattgagggtcagaagctatccggtgatttggtggataaattcaagaacgttcaagtttcagtgattcaggcctaccccagattgatcaacttcggtagaggtcacgatgaggctattttagctaatggtaactcccactcttttcctccatctgtcgagcaggaaatgaagtcatactaccaaaagatgtacctgaaacagttagagatcaaatctgttatcaactcattaaaagccttcaaagattcggataaccctcacgaacaagacattttcgcttgtatgatccattctttgttggacgagtacagattctttccagaatatccaatcgacgctttagccacaacttccgttctgtttggatctactatttacttccaattgattgaaggtacaacactgaccattgcattgagatacattctagaatcatgtcgtcagcccccagaggacaacatgtttaaatttgctgtacaagctctttacactttccgtgaaaaactaggtgactacaagtcttactgtgctcttctctccgaggtcccttccttgaaacaacagccacaaatttatgaaattcttcagcaagttatgaacggaaccttcagagcccctccctccatcccttctcaaggtatcggttctggagagcgtcaaccatcgcagggaaagcagccatccaatgattccttagttgtgtccaagtttaagtccttgaaccttgccgtggagttacagagacgtgaccaagaaacccctgatgagaatgtatccgatcatgttttgttcctcgtcaacaatatcaccgaggaaaatctctcagctaaggttgaggagatgaacaaggttctcgagccacagtatttcgaatggttctccaactacctcgtcacccaaagagtcaagactgaaccaaattaccactccctttattgttccctcatttcccgtcttgacaatttgctgttggatgcctatatcttgaatcttactttcaaggaaatcattttgatcttgaacaaatgttacgacgtcaacgatgagatctctggtcctgaaagaactcacctgaagaatttaggttcttggttgggtctaattaccctcaccagaaaccgtccattaaagcaccgtaacttggcattgaagatgctggtactggaagcttatgacaagaacaagttggaagttgtcttgcccttggtctgtaagattctggatcaggcaaagaactctaaagtctttttgccaccaaacccatggactgtcggaaatcttaagctgctcaaagaactgtatgatgttggaaaccttcctcttaaacttaagttcgagatcgaagtcctgtacaactcgctgaacactaagttgggagacatagaggccgcaaacatcatcagaactcatcaaccggctgatatcgaccagtttgccgtcgccaccaacatgatgaaggaattgacattgtccaacgtcaaccagatgaaacagcaacaacaacagcaacaacaacaacaacaacaacagcagcaccaacagcagcaacaacagcagcagcagcaacagcaacagttcttcctacagcaacaggctgctctacaagctcaacaagtgcaacagcctcaaattccattcgacccccaggccaacccaggtgtgtctactgcaacaccagctgacgaatccaaccagttgaaggtgttctctaacctccttggtaccaccagttttgtcacaattccaacccttaaatacctttttcaagctgctttagccagagctgttaaggagattctccctttggtagttgaccgtacaaacttgattgccttagtgacaaccaaagcacttgtctccaaagattttgctttggagtctgatgaagccaagtttcgtactgcttacatcaaccaagtctcatatttaacagagtcactatctcttgcttcatgcagagaccctttaagggaaagtattcagatgaacgctttgcaaatcgccaataccatgcctaacatcgatagtactctatttgaagagcttcctcaagccatcactgataatattgacttggcctctaccattatccaaaaagctgcagttgagagagctattcaagatattgatgagctgatggctcctcagctggccattagaagacagcacagagagctgaagcccaaccaacaatttattgatccaactatgagatcccgttacccaatgcttcttccagttccacttggattgaaaagtgacggagtcatcccaaaacaattcatgatttacgagaactttggtaaaaatagaattgtttctcctatgcaacaacctgagcacttgcagaacatcaatagtcaattgaacccttctttgagacaaggagcccaacagcctctggttcctcctggtgttgctgagcaaatgaagcaacaaatgccacctgctctgccaggtcaaggtggtgctgtctctctggagcagacttttatgttcctgcagcaactggtggactctgttattaacttgaccagggatgctccagagaagctgattagtgaagtgaatacagattctgtggttgttactgttttgggtgagattttgcaaacttgtattggtgccactgtgaccgattcactgatcctgaaaatctctcaatacgtcatgaatatgttatttgttagaactaacagctctttgactcaaaacaccctggttttcttgttagacaaattgtgtgagctatcaccatttactgccaaagacatctcctggtggcttgttcacgctgaagacgaacgtaagtacaacaaaaacgtgatgcgtgatcttatcttactgggtctggtcccattggccgagttggacagatctcttgctattcaaattgagaaaaagaatgtcaaggctgtgctgttcactatctacttgattcatgactcaattttatctgaggacccaattgctctgagagcagatctgattaattcaatcgaggccttgcaagtccttgctcatgaaccttcagaaattggaagaaaggcttacatgtctatttccagactgaaggcaatcgttaagagcaattctatccagatttttaaaatgtttggcacatccaccatcagtaagaagcaatatatgtcatacgtttttgcagagtgggttaaattagtccaatattctcgtgttaacagagttttggaagatttcatttggcaattggttgatgacggtattgtcaataactctgaaaatctgagtttgctaatcactaccgccactgagatgtccgttgcagcctttagcaaggaggctgatccttccaagaaattgcacatcgagacttacgccccagccgatgccctagctttgcttttggtcaaactgctattaatgcaggaggattctaccggtgttgaaagaaagacttttttcaattccatgttggctgtcattgtgttggctttcgcctccgaccacaacaacaactcaacctctttcaatgagagaccttacttcagaatcttctcatctcttttcagttactggttaagtgctagacacgagtttgaggatggtgatgatgaatcgttgaagaccttcaactctgaattgtatcttattttggctcaaaatttgatggttatgcaaccatcttctttccctggtttcacctttgcttggatttctttaatttctcatagaatgttcatgcccatgattttggaggttcctgaaaacaagggatggggacgtttcgtgaacttacttcaatgtttgttgtcattccaacttcactacgttgactctgagaagatctcagacgttgttaacgtcgtttacaagggtactcttagaattattgctttgctgtcacacgacttcccagatttgctcgttcaataccattatcagttgatttcctccactcctgagtcttatgtgcagctcaagaacataatctcgtctgcttaccctaagggaattactgttccaaaccccttccagcagggtttgaaggtcgatagacttgaagaaatcaagcaagagcctcctatcggatatcatccagaatctgacttgaccgctaaaggactaaagaagccagtcgagtcctatctgcgtattccttcgcaatctttattgaagacaatctccactggtctttcggttgctgaaccaagaaacggtaagtccaagtacgatgctggtttggttaatgccgttgtcttcttcgttggtattgccgctgttgaagaacagaaatcctttagagatggctcttcatttgactccacatcaaaccacgttatgttgttgtcttccctgatcaaggatggagatgtcgaattacaaaacctgatattgactgctatcgctaaccaattgcgttatcctaacagtcacacccactggttttcttgcattctgctgcacttcgtcggttccgctactttgtggggtgaccaaagagaagcaattaagttcaacatttcttgtgttttaaccaagagagctatgtcttacaatccaattccttggggtatcttggtcactttcttggagctcgtcagtaatagtgagtatgagattttctcttccccattcatcaaaggtgacgccactttagaaaggttgtttggaactttgcagcatcatgtcagaaatcaaaagcctattgacgagcaaccagagccattgaagttgtaa

SEQ ID NO: 3517 - DNA, 900 bp, Artificial Sequence
  Optimized genes for Pichia pastoris
atggctctggccattcctcaaattggtttcggaactggtaccacctggtacaaatatggtagagaatctgaaattgatcaaaccttggttgacgctttggtctctgctcttcaagtgggaattacccacttggatggtgctgaatgttacggtactgctttagagaccagagatgctatcaagaaagctaacattccaagagagaagttgtggattactgaaaaatactacgctggtgactcttctcacaagtctaaatccaaggccgccaacccattagctgctctcaaggagatcttgagattggaggagttggaatatgttgatttgtatttgttgcactccccatacattactaaggaaactcacggttttactcttgaagaggcttggggttacttggaagaagctcaatctttgggtttggccaaaaacatcggtgtctccaacttcactgttgctgacttggagaaaattctgaaggttgccaaggtcaagccacaagtcaaccagattgagtacaacgctttcttgcaagaccaaactccaggtgttgtcgagttctctcaaaagaacggtattttgattgaagcttactctccattggctcctttgtacaagggagacaagtccatcaaagaagttaaagagtttttggactacgtttacgagcttggtaagaagtacggaaaatctgacactcaagttttgctgaaatgggtcttgcagaagggtatcatcccaatcactacttctaccaagactgagagagttaaggaatttttgaagattgacgatttccaattggagccatctgaggttgaaaagatcaccactttgggagctaaggctccagttgttagacaatactgggttccagagtattctaagtttgactaa

SEQ ID NO: 3518 - DNA, 456 bp, Artificial Sequence
  Optimized genes for Pichia pastoris
atgggtagaatgcactcttctggtaagggtatctctgcttccgctttgccatactctcgtaaccctccttcttggttcaagttgaccccagatgatgttgttcaacaagttattaagtacgctagaaagggattgactccatctcaaattggtgtcttgttgagagatgctcacggtgttgctcaaaccagattcattactggtaacaagattctgagaattttgaagtccaacggtttggctccagctattccagaagatttgtactacttgatcaagaaggctgtttctgtcagaaagcacttggagagaaacagaaaagacaaggactccaagttcagactgatcttgattgagtccagaatccacagattggccagatattacagaactgtttccgttttgcctccaaactggaagtatgagtctgccactgcttctactttggtcaactaa

SEQ ID NO: 3519 - DNA, 855 bp, Artificial Sequence
  Optimized genes for Pichia pastoris
atgagaaacgataagatttctttgtactctcctgactactacttggcctgtactgttggtggagctcttgcttgtgctcctacccacggtggaatcactccattggacttggtcaagtgtcgtcgtcaagtcaactcttctctgtacagttctaactggaagggtattacctctatcatcaagaacgaaggtttcccagctttgtatactggtgttcttccaactttcattggatacggtcttcaaggtgctgccaagtacggaggctacgagtacttcaagaagcaatacactgatctgaatggtggtaaggccaacacttttaccttcttggctgcttctgctaccgctgagtttattgccgacattttcctgtgtcctttggaggctatgaaggttaaaattcaaaccactttgcctccagacaagccaaacctgagagagttgtctctttacaagggattggttcctctttggtgtagacaaattccatacaccatggttaagttcacttcttttgagaagattgttgatttgatttactccaaggctattaagaaaccaaaggaccaactgtccaacttgcaacaaactgctgtttcctttactggaggttacattgctggtatcttctgtgccgctgtctctcatccagctgatgttatggtctccttgatgaacaacaacaaggagggtctgtctgttgctcaattgtaccaaaagatcggtttttctggtttgtggaacggtttgggtatcagaattgtcatgattggtaccttgaccggattccaatggttgatctacgactctttcaaagtttactcaggattgccaaccaccggtggtcactaa

SEQ ID NO: 3520 - DNA, 1089 bp, Artificial Sequence
  Optimized genes for Pichia pastoris
atgttgttcccaagagaaactacttgttccactgaatctgacttcaacggtgagcacatgggtgctagaatctcttccgtctttgttattctggtcacttccatgttcggagcatttttccctatcttgtcctccagatactctttcatcagacttccagactggtgtttcttcattgccaagttcttcggttctggtgttatcatcgctactgctttcattcatttgttgcaaccagccaacgaggctctttctgatgaatgtttgggtgaaggttttgaagactacccatacgcctttgctatagctctggtttccatttttgtcatgtgttttggagaattgatgactttcagattcatggaccacaagctggaagttgctgaggagaagcaaatcaacgctgacaagatttccaagttggaaaatgaagaagatgatgaggttggtaccggtttggacttgaacactcagccagctccagaacctcaacaaatgaacccagagaacaccttagaaaaccactttgcccaccaaaacgaacatcaagatattgagaatgtcggtactttggttgacaacaacttggagtcttacaagtctcaatttatttctgttttggtcttggagtttggtatcattttccactccgttttcgttggattgacccttgctacctccggtgacgagttcaccactctttatccagtcattgtttttcatcagatgtttgagggtctgggtttgggaaccagaattgctgccactccttggccacacaacagaagattgactccatggttctttgcattggcttacggtttaaccaccccaattgctattgccattggtcttggtgtcagacactcttatgctgctggatcttctaccgctttgattaccaacggatgtttcgatgctgtttctgctggtattttgatctacactggattagttgagctgatggctcatgaatttatcttctctactcaattcaatggtaagggtggtttgaagagactgttgtgggcctacgctatcatgtgtcttggaactggtctaatggcccttttgggtaaatgggcttaa

SEQ ID NO: 3521 - DNA, 771 bp, Artificial Sequence
  Optimized genes for Pichia pastoris
atggctgttggtaaaaacaagagattgtctaagggaaaaaagggtctgaagaaaaaagttgttgatccattccaacgtaaggaatggtacgacatcaaggccccaactacttttgaaaacagaaacgtcggtaagactttgatcaacaaatctactggtttgaagaatgctgtcgatggtttgaaaggaagagtcgttgaagtctccttggctgaccttcaaggttccgaagaccactctttcaagaagatcaagctgagagttgacgaggtccaaggaaagaacttgttgaccaacttccacggatttgacttcacttctgacaaggtcagatctttggttagaaaatggcaatctttggtcgaggctaatgtcactgttaagactgctgatgactacgttttgagaattttctgtattgctttcaccagaagacatcagaaccaaattaagaagaccacttacgctcagtcttctcaactgtctgctattagaaagaagatggttgagatcatgcaaagagaagtttccaatgttaccttagctcaattgacttccaagttgattccagaggttattggtagagagattgagaaggctgctgaaggtatctacccattgcaaaacgttcacatcagaaaggtcaaggttcttaagcaagctaagttcgacttgggtgctcttcttgctttgcacggtgagtctgttactgaggagaacggtaagaaggtgggttctgagtttcaagatgttgtcttggagactgtctaa

SEQ ID NO: 3522 - DNA, 987 bp, Artificial Sequence
  Optimized genes for Pichia pastoris
atggttgttgccattgagggaggtactggtctgggattgatgaacttgacttggaagccaaccccaactccaattgacgatgctattgaaactattcgttacgccgtcgaagaagctggtgttagatatttgaatggtggtgagttctacaatttcccattggactctaatttgaacttgcaatacattcaagaattcgctaagcgttatccagaattgtacaagaaggtttcattgtccgttaagggagctgtttctttggttgatgtttccccagactcctctcctgaaaacttagagaagtccatctccaacatcaccaagcacttgccaaacaacttccttccaatctttgagccagctagaatcgacaagagatactctatcgaggagactatcaagaacctttccaagttcgttgaggatggtagaattggtggtatttccctgtctgaagttggtgctgacactatccgtagagctgccaaggtggctccaattgcatgtgttgaagtcgagttttctttgttgaccagagatatcttgcacaatggagttttggctgcttgtgaggacttgaacattcctatcattgcttactcacctttgggtagaggtttcttgaccggtaccatcaactctaaggctgatattccagagggtgacatcagattgtccttggagagattcaacgatgatgaggttattgagcacaacctgaagttggtccacggtttgaagaagattgccgacaagaaaggtgtcactttggctcaattgtctcttgcttggttgagaaagtttggtgataagcatgtcaaggtcttgcctatcccatcttgttcttctccaagaagagttgctgagaacactaaggagatttctttaactgattctgagttccaagagatcactgactttgctgaatctgttcctattaagggtggaagatacaacaaggcctccgaggctgtcctgaacggttaa

SEQ ID NO: 3523 - DNA, 1938 bp, Artificial Sequence
  Optimized genes for Pichia pastoris
atgccagccgttggaatcgatctgggaactacttactcttgtgttgctcattttgctaatgacagagtcgagatcatcgccaacgaccaaggtaacagaaccaccccatctttcgttgctttcaccgacaccgaaagattgattggtgatgctgctaaaaatcaagctgccatgaaccctgctaatactgtctttgatgccaagagactgatcggtagaaagttctctgatgctgaaactcaagctgatatcaagcactttccattcaaagttgttgacaagggaggaaagcctaacatccaagtggagttcaagggtgagaccaaggttttcactccagaggagatttcctccatggttttgaccaagatgaaggatacagctgaacaattcttgggagacaaggtcaatgatgcagttgtcactgttcctgcctacttcaatgattctcaacgtcaagctaccaaagatgctggtttgattgccggtctgaacgttatgagaattatcaacgagccaaccgctgctgccattgcttacggtcttgacaagaaggctgagggtgagaagaatgttctgatttttgacttaggtggaggtacttttgacgtttccttgctgtccatcgaggatggtatctttgaagtcaaggctactgccggtgacactcacttgggtggtgaagacttcgataatagattagttaaccacttcattgcagagtttaagcgtaagaacaagaaagacctttcatccaaccaaagagcattgagaagattgcgtactgcttgtgagagagccaaaagaactctttcttcttccgctcaaacttcaattgaaatcgactctcttttcgaaggagtcgatttctacacttcccttactagagctcgttttgaggaactgtgtggtgacttgttcagatctaccattgagcctgttgagaaggtgctgaaggacgctaagctggacaaatcccaagtcaacgaaattgtcttggttggtggttccaccagaatcccaaaggttcaaaaactggtttctgactttttcaacggtaaagaaccaaaccgttctatcaatcctgatgaagccgttgcctatggtgccgctgtccaagcagctatcttgtctggagatacttcttctaagacccaagatttgcttctgttggatgttgcaccattgtctctgggtattgagactgctggtggtatcatgaccaaattgatccctagaaattcaactattcctacaaagaagtctgaaaccttctccacttatgctgacaaccaaccaggtgttcttattcaagtttacgagggagaacgtgccaagactgcagataacaacttgttgggtaagttcgagttgtccggtattccaccagctccaagaggtgttccacaaattgaagttactttcgacatggatgccaacggaattttgaacgtctctgctgttgaaaaaggtaccggtaaggcccaacagattaccatcaccaacgataaaggtcgtctttccaaggaggacatcgaagctatgatttctgaggcagaaaagtacaaggacgaagatgagaaagaggccgccagaattcaggctagaaacgctttggagtcttactcattttctttgaagaacactttgaatgaaaaggaggtcggagagaagttggacgccgccgataaggaatctttgactaaagctattgatgagacaacctcttggattgacgagaaccagaccgccaccactgaagaatttgaagcaaagcaaaaggaattggaaggtgtcgctaacccaattatgactaagttttaccaagccaatggtggtgctccaggaggtgcagccccaggcggtttcccaggtgctgctggagccggagctgaggctcctggtgccgacggtccaactgtggaagaggttgattag

SEQ ID NO: 3524 - DNA, 906 bp, Artificial Sequence
  Optimized genes for Pichia pastoris
atgggtggtctttcttttgaaagacaatctacttctattttgaagaacttggacaacccaattgaacaagaggaaatcagaactccagaaccagagatggaagtcaaggagaccgttgaaggtgttccaatggctttgtctggttccacttcctctaccaagtctaatccagatatcaacaacactgttgttaaccctgaatctttggttcctccaccacctcctgttgattctgtgccattcaagttgaacaagcagtccgttctgtctgattttttgaagcaaaaccgtttggccaccgagagaatcaatgaatactctccagctatcattgagtctaacggtaccggtcaacagccacacactttgtggattggatgttctgactctcgtatttctgaagcttgtttgggtgtgatgccaggtgaagttttcacccacagaaacatctgtaacattgtcaactccaacgatttctctgtcactggtgctattcaatttgctgttgacgttattaaggttaagaagattattgtttgtggtcacaccgactgtggaggtgtctgggctgctttatcttccaagagaattggtggtgttttggatctttggttgaatcctgtcagacacgttagagctcagaacagaaaggaattgtccttgatcaaggacccaaaggagaagtgtgctactttggctagattgaatttgattaactctgttcaacaattgaaaagacatccatcttgtcttgctgccctgaaaaaccaagatgtggagatctacggtttgatgtacgatgttggtactggattgttgtctgaggttgagattccatgtgatgatgagtttgacgatgtcttccacgtcggtgaccacgatgacactgaggctggtggacattaa

SEQ ID NO: 3525 - DNA, 1440 bp, Artificial Sequence
  Optimized genes for Pichia pastoris
atgtctttgcaagaagctgtcaaggagattcaatcttcctttgatgtctctcaagaggtccttcaaagatccgttgacaagttcattgagttggccaagaaaggtcttgcttccaatgaagataagcttggtatgccaatgttgccagcatacgttactcaagttccttctggtaaggaaaagggtacttacttagctgctgatctgggtggtaccaactttagagtctgttctgttcacctgaagggagataacactttcaacctggtccaacaaaagtctccaatcccagctgacatgatggttggaactggtgatcaattgtttgcttatttggcctctaagatcagaaagtttttggaagaacaccacggtgacgctttggaggctgcccatgaaactaactctagagctaactacctgaaattgggtttcaccttctctttcccaaccgctcaacactctctggattccggttccttggtcagatggactaaaggattcaatattccagatgttgtcgaccaagatgttgttcaactgttgcagaagcacttggatgccggtaagattcctgttcatgttgctgcactggccaatgacactgttggtaccttgttgtctcgtgcctactctgccaacgctattgctggtggaaagcaaggtgagactatcatcggtgccattttcggtactggaaccaatggagcttacttggagaagttggacaatatcaagaagctgccagaggccgtcgttaaggacttgaaggctaagggtgttacccacatggtcattaacaccgaatggggttcttttgacaacagacttgaggttttgcccaccaccaagtacgacagagacgttgacgcattgactgctaatcctggtattcatttgtttgagaagagagtttctggaatgttcatgggtgaaattttgagaaacattcttgttgatttccactccagaggtttggttttcactcagtatccaaacttcgagtctcttccacacagactgagaactccatgggatttggactctgagaacttgtccttatttgaagtcgatgactccaaggatatgaagccaactgaagttacattgctgcaagcattaagattgcctaccactttggaagagcgtcaagctatccaagccttgaccagagccatctcccgtagatctgcttacatttccgctgttccaattgcagcaattatcatgctgaccggtgctcttgaaggtcatcacattgaagttgatattggtgtcgatggatctgtggttgagttctacccaggttacagaaccatgcttagagatgctctggctttaacccaaattggaactaagggagagagaagaactcacatcaacattgccaaagatggttcaggagtcggtgctgctttgtgtgcttctgtctccatctaa

SEQ ID NO: 3526 - DNA, 354 bp, Artificial Sequence
  Optimized genes for Pichia pastoris
atgtctgaccaaggtagaaaggacttcactgataaggtttctgaaggtttgaagccagactctcagaagacttacttggagcagaccaaggaaactttgaccgatgccggtgacaaggctgctaacaagttgactccagaggaacaaaagggtttcggtcaaagagttggtgatgctgtcaagaacggtaaagatgaggctgacaaagagactcaaccaactttggttgagcaagttcaaaacactgctggagacgctttggaagctggtaaggaggccttggccaacacctctgagtacatttctggagctttctctggtgccaagaatggtgctgattctactaagaagtaa

SEQ ID NO: 3527 - DNA, 648 bp, Artificial Sequence
  Optimized genes for Pichia pastoris
atgtctgaagattacagattggtcgttgttggtcctccatctgtcggtaagtctgctttgaccattcaattgatcagaggagagtttttgactgagtacgaccctactattgaagactcttacaagcacccatgtgagattgatggtgctcctgttatgttggacattttggataccgctggtcaagaggactactcttccatgaaggaattgtacatgaaaactggtgaaggattcttgttggtgtttgctatcaacaagcgttcttctttggaggagttgaaaccattctacgatcaaattgttagagtcaaagaaggtatgcaatctgttccaatggttttggttggaaacaaatctgatgttgaggattccaagagagaagtttccagagatgagggtgaggccttggctagacaattcggttgtcaatacattgagacttctgccaagactaacactaatgtcaaggaggctttttacaacgttgtcagagctaccaagtccatcaaggacaccaaccaaaccggtattgacacttccgttgacagatctaagaaccacgagaagccaactgttagaggtaacgctactgctccagcttcttcatctgactcctcctcttctggttgctgtattgtcatgtaa

SEQ ID NO: 3528 - DNA, 981 bp, Artificial Sequence
  Optimized genes for Pichia pastoris
atgaagactcaaattgactacaagttctacccaaccaaggaagttactatcatttctgctccattctccgctggtcaaggaaagggaggtgtcgagaaaggtccaggtcttttgttgaagcacggacttcgtgaggacttggaggctcttggatggtctgtctccatcaaggagccactgaagggtaccggtttggacgttcctccttctgaattggaagaagagtttgacagatctcacggtatcgccaaaagacctaccgttgtcgctcaagctactgagagagtttacagagctgtcaaggaggtttctcatcaaaagagattgccattgaccatcggtggtgaccactccattggtgtttccactttggccggattcttggatgccaaccctgatgcttgtgttttgtggattgatgctcatgctgatatcaacactccagaaacttctccatctggtaacattcatggtttcccagttgcccttgctatgggtctgtccagagaggtctggccaaagcaattctcttggttggatgaggccaagaacaagttggctgctgaccgtatcgcttacattggattgagagatctggacccatgtgagaagaagagagtcagagagttgggaattgctgcctactccatgtaccacgttgacaagtacggtattgccaaggttgttgagatggctctggccagaattaatccaactggtaagtccccagtccacatctcttacgacgtcgacgctttagatcctttgttcactcctgctaccggaacccctgttagaggtggattgactttcagagaaggtatgtatattgttgaagctgttgctgagactggaaacttgggtgctttggacattgtcgaatgtaacccagatttggcttctactgatgttcacgagatcgacactattactgctggatgtgctattgctaagtctgctttcggtgagaccttggtctaa

SEQ ID NO: 3529 - DNA, 969 bp, Artificial Sequence
  Optimized genes for Pichia pastoris
atgactgatgctgctgctccaaagaagcctcaaaagaacactgctgtcgacttgttggctggtggtaccgctggcttgtttgaagctttgtgttgtcatccattggacactattaaggttagaatgcagttgtatagaagaacttctgctaatgccggtgtgaagccaccaggattcatcaagactggattgggtattgctgccaaggagactcctatggctttgtacaaaggtttgggagctgttgttattggaattgttccaaagatgggtattagattctcttcttacgagttctacaagagacaactggctgacaaggaaggtaagaattctactttgaccactttcatttctggagtcggtgctggagttactgaggcttgtttggtcgttaacccaatggaagttgtcaagatcagattgcaagctcaacaccactccatgtctgacccattagacattcctaagtacagaaacgccttgcacgctggttacttgatcgtcagagaggagggtttcaagacactttacagaggtgtcaccttgactgccgctcgtcaagctaccaaccaaggtgtcaacttcaccgtttactctaagattaaagagagactgcaggagtaccaacaattggaggttcttccatcttggcaaacctctttggttggtctgttgtccggtgcccttggtcctctttccaacgctcctttggataccatcaagaccagaatgcaaagagaaactggtgttaccaatgaatctggtgttgctagaattttgagaatttccaagcgtttgattcaagaggaaggtatgagagctctgtacaagggtatcactccaagaatcatgagagttgccccaggtcaagccgttaccttcactgtttatgagttgatgaaggatgttttggttaagttgccaattattggtaacgaagactctcaagaattggtcattgaatag

SEQ ID NO: 3530 - DNA, 456 bp, Artificial Sequence
  Optimized genes for Pichia pastoris
atgtctgaagactgggattctgttactgttattggaagaaaggcaagagttggtggttctggtccaagagaaaacatcgccagaaccaagggtgctatcaatgaagctagaagaactggttcagtcattgctgttgaaaagaagtacggttccggtaactctaagtctgacccagaaggtcaaaagctgaccaaaattgacagagagactgatgttgttcctcctaagaagattgatgctaacgttggaaaggccatttccaaggctagattggacaagaaattgactcagaaggagttggctactaagatcaacgagaagcctaacgtcgtcaacgactacgaggctggtagagctgtcccaaaccaacaattgttggccaagatggagagagtcttgggtgtcaagttgagaggtaagaacattggtgaccctttgttcccaaagaagaattag

SEQ ID NO: 3531 - DNA, 1914 bp, Artificial Sequence
  Optimized genes for Pichia pastoris
atgttgtctgtcagaagacaattgatgtctggtcgttcctggttctctaccacttccgtcgctcgtaaggtctactctgctcaacaggatgttaagggtaccaacgcctccatcgccatggctaaggactaccacatcatcgatcatgaatacgattgtgttgtcgtcggagctggtggtgcaggtttgagagccgctttcggattggcaaaggaaggtttcaaaaccgcttgcatttccaagttgttccctactagatctcatactgtggctgcccaaggtggtatcaacgctgctctgggaaacatgcacaaggatgactggcactggcatatgtacgacactgtcaagggatctgattggttgggagaccaagacgccattcattacatgaccagagaggctcctgactccattattgagttggaacattatggagttccattttctagaacagaagaaggtagaatttaccaacgtgcatttggtggtcaatccaaagagtacggtaaaggtggccaagcttatagaacctgtgccgttgccgacagaactggacatgctttgttgcacaccttgtacggacaatctttgagacacaacacccacttcttcatcgagtttttcgctatggatttactgatgcatgatggtaagtgtgtcggttgtattgcttacaaccaagaggacggaaccatccacagattcaaggctcataagactatcattgctaccggaggttacggtagagcatacttctcctgtacctccgctcacacatgtactggtgacggattcggtatggtttcaagagctggattaccattggaggatcttgagttcattcaattccacccatctggaatttatggttctggatgtcttatcactgaaggtgccagaggagagggtggatttttggtcaactccgagggagaacgtttcatggaaagatacgctccaacagccaaagatttggcctgcagagatgtcgtttctcgtgctattaccatggagattaacgaaggacgtggtgttggtcctttgaaggaccacatgtatttgcagttgtcccacttgcctgcttccgttctgcacgagagactcccaggtatttctgagaccgcccatatttttgctggtgttgacgttaccaaggagccaattcctattttgccaaccgttcactacaatatgggtggtgtcccaactaaatggtctggtgaggcccttactttagacgaagatggtaacgacaaggttgttgagggactgttggcttgtggtgaagccggttgcgcttctgttcatggtgctaacagattgggtgctaattcattgctggacctggttgtgtttggaagagctgttgctcacactattagagactgtttgactccaaacactcctcataaagaacttccagctgatattggttttgagtctattgccaatttggaccgtgttagaactgctgacggtgatatctctactgcagatctgagactggaaatgcaaagaactatgcagaagcacatttcagttttcagaacccaagatatcatggacgagggtgtgaagcaaatcaatgaaattgataagaagtttgccaacatcaagaccaccgatagatccatgatttggaactctgacttggttgaaactcttgaattgcaaaacttgttaacttgtgctactcaaactgccaagtctgcctctgtgagaaaggagtccagaggtgcccacgctagagacgatttcccagagcgtgatgatgagaactggatgaagcattctctgtcttggcaacacaagtccggttccccagtcgagttgaactacagaaacgtcattactgagactttggatgaagctgaatgtaagccagttcctccaactgttcgtgcctactaa

SEQ ID NO: 3532 - DNA, 933 bp, Artificial Sequence
  Optimized genes for Pichia pastoris
atgcaaattttcgtcaagactttgaccggtaagaccatcactctagaagttgaatcaagtgacactatcgacaatgttaagtccaagattcaggataaggaaggtattccacctgaccagcaacgtttgattttcgcaggtaaacaattggaggacggtagaaccttgtctgattataacattcagaaggagtccactttgcatttggttctgcgtttaagaggtggaatgcagatttttgttaaaacactgaccggaaaaactatcaccttagaagtggaatcttccgatactattgataatgtcaaatctaaaattcaagacaaggagggaatcccaccagaccaacaaagattgatcttcgctggtaaacagctggaggatggtcgtaccttgtccgactacaacattcaaaaagagtcaactttacacttagttcttagacttcgtggtggtatgcagatcttcgttaagacacttactggaaagaccatcacattggaggttgagtcttcagacaccattgacaacgttaaatccaaaatccaagataaagagggtatccctcctgatcagcagaggctgatctttgccggtaagcaactggaagatggacgtactctttcagattacaacatccaaaaggaatccacccttcatctggttttgagattgagaggtggtatgcaaatctttgtcaagactttgactggtaagactattactttggaagtcgaatcttctgacacaattgacaacgtcaagtctaagatccaggacaaagaaggaattcctccagatcaacagagactgatttttgctggaaagcagttggaagacggaagaactctgtctgactacaatattcaaaaggagtctaccttgcacttggtcttgcgtctgagaggaggtgagttgtgttccattgtttaa

SEQ ID NO: 3533 - DNA, 1866 bp, Artificial Sequence
  Optimized genes for Pichia pastoris
atgggtaaggattacactccattagtggccactattgacatcggaaccacttccactagagccatcttgttcgactaccatggacaagaggtcgccaagcaccaaattgaatattctacctccgctcaagacgatatcaagagaaaaagatctcagatcatttcttccgaaggtatctctctgactgtttctgacgatttggaagtcgagtcagtcgacaataaggcaggtcctaccttgcaattccctcaaccaggatgggttgagtgcagaccatctcatattctggccaacgctgtccaatgtttggccgcttgtttagttaccatggaaaacaagaatttggaccgtgacgagaagaacaagtacaagttgatctccattggtgttgctaacatgagagaaactaccgttgtctggtccaagaagactggaaagccactttacaatggtattgtttggaacgacacaagaaacaacgatattgtggatgagtacactgctaagtactctgaaaaggagagagaggaaatgagaactctttgtggttgtccaatttctacttacttttctgccaccaagttcagatggctgctgaagcatgttccagaggtcaagcaagcttacgataatgccgatggagacttgatgtttggaactatcgactcttggcttatttaccacttgactaatgaaaaatcccacgttactgatgtcactaacgcctccagaaccaacttcatgaacattgagaccaacaaatacgacgacagattattgaaattctgggacgttgacacttcaaaggttattcttcctgagatcagatcctctgctgaggtttacggtcatttcaaagttcctcatttggagtctatcggttacgttgaatcttacttgaccgatgatgcccttgctcttttggagactatcgagggtgctcctttggctggatgtcttggagatcaatctgcttccttggttggtcaattggccgtcagaaaaggtgatgcaaagtgtacctatggtactggcgccttcttgttgtacaacactggtgaccaaactttgatttccgagcacggtgccttaactactgtcggttattggttcccaggtctggacgaatctgaggacggtaaacattcttctaaaccacaatacgctctggaaggatctattgctgttgccggttctgttgttcaatggttaagagacaacttgagactgatctccaaggcccaagatgttggaccattggcttctcaagttgataactccggtggagtcgttttcgtcccagctttctctggtttgtttgctccatactgggattccaactctagaggtaccatttttggtcttactcagtacaccagtgcctctcacattgctagagctgctttggaaggtgtttgtttccaaaccagagcaattctcaaggctatgatttcagatgctggtgcttcagccgacttccttgaagagtcctccaaagctaccggtcacaaccctctgtctgtcttggcagtcgatggtggtatgtctaagtctgatgagatgatgcaaatccaggctgacattttgggtccatgtgttacagtgagacgttccatcaacccagaatgcactgccttgggagctgccattgcagctggtttcggtgtcccaaaggaagatagaatctggggttccctgaaagaatgtactgaggctatcctggagggaaacaagatgtacctggctgctggtaacacctctttggatttcaaggctactttatccgatgaagttagaagaaaggaatggagattgtgggaaaatgctattgccaaagccaagggttggttgaaggacaccgcttaa

SEQ ID NO: 3534 - DNA, 1116 bp, Artificial Sequence
  Optimized genes for Pichia pastoris
atgtcttcatctgagatcatcgagaacactgctttgttgcaaaagtaccaatctttggaccaacgtggtaagatcattgctgagtatatctggattgatgcctctggaggaattagatccaagggaagaactctttctaagaagccttcttccattgacgatttgccagaatggaactttgacggttcctccactggtcaagctccaggtcacgattccgatgtttacttgagacctgtttcttactatgctgatccattcagacgtggagacaacattgttgttttggccgaatgttggaacaacgatggtactccaaacaagttcaaccacagacatgagtgtgccaagttgatgaaggcccacaaggaccaggaggtttggttcggtttggaacaagaatacactttgctggacaagtatgataatgtctacgcttggccaaaaggtggtttccctgctcctcaaggtccttactactgtggtgtcggtaccggaaaggtttatgctagagacatgattgaagctcactacagagcttgtattcatgctggtatcaacatctccggtattaacgctgaagttatgccatctcaatgggaattccaagttggtccatgtaacggtattgatatgggtgatcaattgtgggttgccagataccttctgcaaagagtcgccgaggagtttggtatcaagatttccttccacccaaagccattgaagggtgactggaatggtgccggttgtcacaccaacgtctctacctctgctatgagagttcctggtggtatgaaatacattgaggctgctgttgagaagttggctaagagacacttggagcacattgccttgtacggttctgacaatgaacagagattgaccggtcgtcacgagaccgcttcaatgacttctttctcttctggtgttgctaacagaggtgcttccatcagaattccaagatctgttgcaaaggaaggttacggatactttgaagacagaagaccagcttctaatatcgacccatacctggtcactggaatcatggttgaaactatctgtggagctattcctgatgctgacatgaccaaggagtacaagcgtgagtctgattag

SEQ ID NO: 3535 - DNA, 465 bp, Artificial Sequence
  Optimized genes for Pichia pastoris
atggttaaggctgttgctgtcttgagaggagactctactgtcggtggaaccgttgtctttgagcaatcttctgagtcttccccaaccactatcacttacgacatcaagggtaactctccaaacgctgagagaggtttccacattcatcaatttggtgacaacaccaacggttgtacttctgccggtcctcatttcaacccattcggtaagacccacggtgctccaactgatgaggctagacacgttggtgatctgggaaacgtcaagacagatgctgaaggtgttgccaaaggtgtcatcaccgataaccaagttaagttgatcggtgaaacttccattttgggaagaactgttgttatccacgatggtactgacgatttgggtaagggaggtcacgctgattctttgaagactggtaatgctggtggtagaccagcttgtggtgtcattggtttggctgcttaa

SEQ ID NO: 3536 - DNA, 1029 bp, Artificial Sequence
  Optimized genes for Pichia pastoris
atggttaaggtcactgtttgtggtgctgccggtggtattggtcaaccattgtctttgatgttcaaattgaacccatacgttaccaccttggctttgtacgacgtcgtcaatgttcctggtgttggtaaggatttatctcacattgatactgacaccaagttggaatcttaccttccagagaacgatggtttggagaaggctttgactggttccgacttggttattattccagctggagttccaagaaagccaggtatgactagagacgatctgtttgcaattaacgctggtatcatcagagatttggccaacggtatcgctcaatttgccccatctgcctttgttctggtcatttccaatccagtcaactctaccgtcccaattgttgctgagattttgaagaagaacaacgttttcaaccctcaaaagctttttggtgtcaccactttggactgtgttagagctaacaccttcgttgccgaactgtctaaagacaaggaagcttctgcatttgataccagagttttgggtggtcactctggtgaaactattgtccctgtcttctctcaatctgctccagaagtttacaaagaattgtccgatgaacaaaaagctgctctggttcacagagtccaattcggtggagatgaggttgtcaaggccaaaaatggagctggttctgccactctttccatggcttacgctggttacaagctgggtcatgctcttcttgctgctatcaacgacactccaaacatcattgagtctactttcgtctacttgaaggactccaagatcaaaggtgccgccgaggccttcaagtacattaatgaaaaattgaaagattctgactcttctgatgttgacttctttgctttgccagttgttctttcttccaacggaattgaagagatcaagtgggatattctggaaaaggttgatgctaaggagactgagttgctgaagattgctactggacaattgtctaagaacattgccaagggtactgctttcattgcaggtaactaa

SEQ ID NO: 3537 - DNA, 1878 bp, Artificial Sequence
  Optimized genes for Pichia pastoris
atgtccaacactaaggagactggtctgtttgaaaccggttccacttcttccgagaatgagaagcaatctatctctgataatgaaattgctgaatcattggaccaacagaacatcttgacccaatactctgaagaagatgtgatgtcaatgggtcgtaactacgccatcaagcatggtttagacccagatttgtttgccaagggagcagctatcgccagaaacccaattggttacaaccgtatggaatttttgtctcaggaggaaaaagagattttgtatcaagaggagcaccaaaagtggaagctgccaaaaaagttgtactacctgatcattatggcttctatgggagcttgtgttcagggaatggatgagtctgttatcaacggtgccaacttgacttaccctgctggacttggtatcggttctgactctgagagagattcatggttgcaaggtttggtcaactccgctccatacatttgttgtggattgatttcctgttggatgactgatgcttggaatgctagactgggaagaaaatggactattttctggacctgcttcatttctgccattacttgtttctggcaaggattttgtaacacctggtaccacttgttcatcgcaagattcatgttaggattcggaattggaccaaagtctgctaccattccagtttatgctgcagagtgtgtccctcataagattagaggtgccctggtaatgatgtggcaaatgtggacagctttcggtatcatgcttggatacgttttctccttggctttccacaaggtgccagaccacggtattggtggaggtggtttggcatggagattgatgttgggttcagccatgttgcctgcaattgtcgtttgtcttcaagtttggtcttgtccagaatctccaagatggcttatgggtaaggaaagacacgctgaggcttacgagtccttaaaggtcttgagaaaccatccagtgcaagctgctcgtgacactttttaccagaatgttctgctgatggaggagaactcttacacttccatgggcttctttggaaaattgaaagaaatggttgtggtcagaaggaacagaaatggtgctatgggagccggtattgttatgttcatgcaacaattctgtggtatcaacgtcattgcctactattcttcttccatttttgttgagtcaggatttactgaaacttcagctttgttggcctcttggggttttggtatgattaactggttatttgcattgccagctgtcttcactatcgacttggctggtagaagaactcttcttttgatcactttcccattaatgagtatgatgctgttgctggctggtttctctttttggatccctgaagaaaacgaaaaggctagagtcggtgttgtttctttgggaatctacttgtttgctgctatttactcatctggtgaaggtccagtcccattcacctactccgccgaatgtgctcctctttacatcagagacgttgtcatgtctttcgccactgctacttgctggttcttcaactcagttcttgctctgacatggccatctctgaagaacgccttcaaggttcaaggtgcttttggtttctacgctgcctggaacatcgttggttttttcttggttttgatgtttcttccagagaccaagggtcttactttggaggaattggatgacgtctttgatgttccaacttggcaacatgcttcctaccaattgaagaagatgtggattaatattcaaagaaacattattagaaaggatgtcgagccaatgccaccattgtacaagcaccacagaatggcccttaccaacgctcaatgggaagagaaacatgaagttgaacttgtggagaacgtttaa

SEQ ID NO: 3538 - DNA, 4512 bp, Artificial Sequence
  Optimized genes for Pichia pastoris
atgtcctctaccagttcatccatcaatgacaaagataaggagtcttccaatattgactccccaaaggataccgttccatatgagcctactagatttgtcggtgatttggaaaatcaaaatgaggatgacatctactcagaacaattgtccagaattttgactcaatcagaggcagttcagaagattcagtccttagctagaaccatgtcacgtatgacaaagaaggaattagcagcttttgaagttaaccaagatgattttgacttgaagatcttgctgcactacttgagagcaaagtccgaagaacaaggtatcgagtcctgctctgccggtgtggctttcaagaaccttactgctactggcatcgacgtttccgctgcttatggtccaactgttgatgaaatgcttagaaacttctttatgtggccaattcgttttgccaagagagagcacgttaagactcgtcagattatcagaaactttaccggttccattgaggctggcgaactgtgtcttgttttaggacgtccaggtgctggttgttctactctactgaagtgctgtactggaaatacatctgaacttttgtctgttgaaggggaattctcttacgacggtcttgatcaagctgagatgatgaaggactacaagggctatgtcatttacaatcctgagttggacacccacttcccacacatcactgtcaagcagactattgatttcgcattaaagatgaagaccccagctaagagagtcgatggtattccaagaaagaagtacattgacacaatgagagatttgtggtgcaccgtgtttggtttgagacacacatacggtaccaaagttggtaacgacttcatcagaggtgtctctggtggtgaacgtaagcgtgtttctatcgtcgaggctcttgccacaggcgcttctgtctacgcttgggacaacgctaccagaggtttggacgcctccactgcccttgagttcacccaagctatcaggacttccaccaacttgctaaatgcttcaggaatggtcgcaatttatcaggctggtgaaaacatttacgagctttttgacaaggtttgcgttctttacaacggtaagcaagtctattttggacctgctgagaaggccagaaagtatttcgaagatatgggttggtacaagcctcctagaatgaccactcctgaatttcttaccgcagtcactgatccatccggaagattcattagagagggatttaagaacaaggtcccagaaaactccgaggactttgagcaatattggttgaactctccagaataccaagagtgtttacgttctcacgaccaatacattcaagaccacaaccctgaggagactagacaaagactggctacagccaagagccaaacaagacaaaaggctgtcagatcaaagtctagatttgttgcctcatacccaaatcagatcgcctactgtgttactaggggattccagagaaccaagggagaaattgcttacaccttggtttatctgtcttcttttttaactaagggtttcattgttggttcaatgtactggaatatcccaaaagacacttcaggcttgttctcaagatccggaattctattctactgtttgttattttgtgccgtcacctctttatctgagatttcccacacctacactaacagacctattattcttaaacaaaaatcttactctctgtaccaccagtcagctgaatcgcttcaagaaatcatcaccgagctgccaaccaagttagttgctgtaattatcttggctttgactacttattttatgcctggtctgagactttccgatggaggttctgctttctggatgtatcttctgttcttgttgttgattcaacaatgtatgtctttcatgttcaagttgatcgctactttgaccagagacgctggaactgctcacgcttgcggtggactattggcattgatgatgtgtgtctacactggttttatcattccattgccatacatgcatcactggatcaaatggttcaactggattaatccaatgcgttactgctatgaatccttgctggccactgaattgcactccagggagatgaaatgttccgagtacattcctaatggtcctgactatgaaggaatctccatggagaattcagcctgtactaccaccgcatataaccacactacaggattggtctcaggtaatgccttcctgacagctacttacaactacagatactctcatgtctggagaaattttggtatcaacattgcctggaccgctggttttattattattaacactatcctttctgagtttgtcaagaatgtggaaggtggaggagacatgttgttgtataaacgtggtcacatgcccaaggagggtattgaggccgtcgacggaaaggtggcctccaaacaggaaatgatggaagctttgaatggacccgatgttgacctgaaaaaggttattgcagagcgtgacgtcttcacttggcaacacttggattacgtcatcccttacggaggtgctaccagacagttgttgaacgatgtccagggttacgtgaaaccaggaaccatgactgctttaatgggagagtcaggagctggtaagacaactcttttgaacactttatcccaaagaatcaatttcggtaccattaccggagatatttttgtcaacggtagacctttggattcttcattcaaaagaagaactggtttcgttcaacagtctgatcttcatttggctgagtactccgttagagaaagtttaagattcgctgtcaatttgcgtcaaagtgaaaaggttcctcaagcagaaaaatacgaatatgttgagaaaatcatcaacctgttgggtatgcaaaactatgctgaagccatcattggaaaaattggtagaggactgaacgtcgaacagaggaagaagctgtcaattgctgttgagctagttgccaagccatcattgctcttgtttttggatgagccaacatccggtctggactcacaatctgcttggtctataatccaatttctaagagctctatctgactctggacaagccattttgtgtaccatccaccaaccatctgcaactctgtttgaggttttcgacagattgctgttattgaaaaaaggtggtcgtactgtgtacttcggtgacattggcccaaactcatcaaccatgttgtcttatttcgagagagaatctggtatcaagtgtggtgttagcgagaacccagccgagtatatcttaaactgtatcggtgccggtgcaaccgctcatgcctctgctgactggggtgacctttgggtctcctcaccagagcatgctgctgttaccgaagagatctctcgtttgaacacagaattgcaaaagagaccacttccagagaacattgaagacttgcaatccaagttcgccaccagctaccctcatcaaattaagattttattcttgagaactatggttcaattctggagatctcctgtttacatcagagccaaattcttggaggccgttgtctgtgctattttcgttggattctcctttgtcaaagtcggacacggtctacaggaggctcagttcggacttacttctattttcatgatgctgatcatttctttggccatgattaaccagatgcacgtctttgcatttgattccagagaactctttgaagctcgtgagagtgcttccaacaccttccattggtcaactttgcttcttgctcaaacctggtgggaaactatctggtgtatggcttgtcagttcctttgtttcgtatgttactactttccagcaggtttcagtggtactgcccaccacgccggatacttttttttgcagtttgttatcatcttccctatctactattgctcctacggtttatgggttttgtacttcagccctgatgtgccaagtgccggtatgatcaacagtaacttcttcgccgctatgttattgttctgtggtgttctgcaacctccacaattcatgccaggtttttggactttcatgtacaaactttcaccttatacttacttcgtccaatccttcgtcgctccactggttcacaatagaaaattggtttgtcgtaccaatgaatacaccctgattactccacctgaaggtcaaacttgttcggagtttctggatcctttcattgaatcagatggtggttatttgggaaacccagatgccactgagtcttgtgagtattgtccatacacatatcaatctcaagttatggagcaattcaacatcaagtggtcctatagatggcgtaactttggatttttctttgcctatattatattcaattacgttgctctgttgtcatgctactacctgatgagagttaaagtttggaacatgaagtcaatcctgaacttcaagaaatggtttaacggaccaagaaaagaaagacatgacccagagaccaacatctttgctgcccagccagctgatgctaagttggccgttctcaagaagaaagagtaa

SEQ ID NO: 3539 - DNA, 396 bp, Artificial Sequence
  Optimized genes for Pichia pastoris
atgatgaccctgttgcaattgttggtcttggtttacattatttacaaggttttcccaattttgagaagattcttctctactggtaccatggtttctgagcaagttttgtccaagaccaaggctttgatcaaggaccacaaggtctttgttgcttctaagtcttattgtccatactgttctcaaactaagaagttgttggaatctttgaacgccaacgctttcgttgttgaattggacactgagccagatggttctgacattcaagctgctcttttggagttgaccggtcaaagaactgttccaaacgtcttcatcaacggtgagcacgttggtggtaactccgacttgcaggctctgaactctgaaggtaagctgaagactttgttgaagaactaa

SEQ ID NO: 3540 - DNA, 963 bp, Artificial Sequence
  Optimized genes for Pichia pastoris
atgccagctattgttgacccttctttccaaaccaaccatgtttgtttgcacgtttccgacattcaaaagtccatcaagttttacactgaatactttggattgtctcttttggctcaggagtccgttccacaattgaagaagcaaatctacttgttgggttacaactctccatccaatgccaactatggaaagcactgggctgacagatctggtgttttagagctgtgtgttgatcagactcttccaaaagattacaaatttgctaacggtaactccccagaagctcaaggtttcggtcacatctgtgtcgctgtcgacaacttggaaactgcttgtgagcaactggagaagaacggagttgctttcaaaaagagaccatctgaaggtagacagaaggatattgcttttgccttggatcctgataactactggattgagttgatcgaacaccaaattggtaagaaggatggtgtctccaacaagtctaactgggttttgaaccacggtatgtacagaatcagagatccaaaggtttctttgaaattctacaaggaagttctgggaatgaagctttactctaccagagaattcccagaggctaagttcactttgtacttcttgggatacgagcacgatgatcaatacgttgagaaccaagaaaagccaagacctcaagctgagagagagtctatcattgaattgacccacaattggggtactgagtcagactcttccttcaagggttaccacactaacaccaccgagccatttggttatggtcatactggtattaagaccaaggacgttgccaagttggccaaagaattggagaatgatgttgaatgggttttcaaacttggtgagatttctgacaagctggccttcttcaaggacccagatggatatttgctggaaattttgcaaaacgattcttttttgaaagaccaaggaaacaaattgtaa

SEQ ID NO: 3541 - DNA, 198 bp, Artificial Sequence
  Optimized genes for Pichia pastoris
atgcaattcaagtctattgttttgactttggctgctgttactgttgctcaagctaacaacttgtccaatgaatccaacggtaccaaccattctaaccacacttcttctgttccaactggtgccgctgtcagagcttctggtatgggtgctggtttgttgggtgcaggtgttgttgccggtgtcgctttgttgatctaa

SEQ ID NO: 3542 - DNA, 1056 bp, Artificial Sequence
  Optimized genes for Pichia pastoris
atggttactaaggagtccatcatttccgatctggagaaggaaaatgtcggacctgagttcggtgaatttctgaacagtcttcaaactgacttgaactctgaaaagccattgattgaacaagttaagtctcagttggaaactcacttcaatttgggaccagagactcaagaattctctcgtaagaatgacaatgctccagttgatcaactgttgactaactactacaacaactatgaagttaacgttttggagtttgttttacaaatgggtttctgtaaggacctttccattcctttgaacgtctggttcgttcttgatatgatttctcaattgtctacttccaagcaagatcttccattagattactacctggttctgaataactcccacactggtaagtattctgactttgtcagatatttgatctacgaggctgttggagctgaaattcactgtttcgagcaaggagacatgcctcaacagtacagatcttccagatgggaagacaaggtcaagggtcctgctttggctaacagaggtccaattcgtggtaatgttggtgctggtgacagaaagatcactttccacttgttgtgcaagaagaccgctagaatgatcttggtcggtgatgatagagagaccgattttgaaatgtctgatcgttctttcgtcactttgcttttggactactatcagagagttggtaccaccaagaaaattgatttgctgttattgaccaacaattacgacactaacatgaacaacaagttgcaacaattaaagattttggagtctttgaatatgttgaagtccaactgttatgtcttggactatcaaattactgctgaccaagtcaccgccaacttcaactcatatgttgaaggtattccagctttcagaagacacgagattgctaactttttgaaaaagagaagaactccaaagaacgctgatgagctgattttcaagtacgttggtagatggaacatctgttaccaaaagaagttccatcaaggtaacatttcaatccaccaaatctctggttacttggattag

SEQ ID NO: 3543 - DNA, 1347 bp, Artificial Sequence
  Optimized genes for Pichia pastoris
atgtctgctcctttgtctcctctgattcaacaaatggtttctttgatggaagctagaaccaacggtgctgacccaggaaccggtatccttcctagattgaactccgctgctgatatgctgggtggtgttgacagaattccaagagagttgattaactacgttcaaggtaaacaattggccttattcggtgactacccttctggtaaggacactgctccatctgccattttcatggtggtttttttctttatttttttggctcacttgaccttgtttggaatcaactggtctagaggtcacaagttcttgctttcttttggtttcgctttctacgctctgctgagagtcgttggatttgctttgagagttgcttggtccagagaaatcacccgtgtccaagttggtattgcctctgaagttttcctgatcatccctaccatcttgttggcttctttcaacttgatcctggctcaaagacttttcacttggagacatccatacgtcggttcttctaagctgttctggggtgccttgttaacagtctactctgtcgttatttctgttgttgttatgactatcgtcgctgctgtcgttccatatgtttaccttttgtcccacagaaactatgaaatgtccaagaacgtcgtcaaggtttcttccattcttgtaattttgtactcattgctggccactggattgattttggtttcctacttgttcaagccaaccaagagagacaagggttgtttgatttaccaaccaacatggttggagtccttctctccaacttacttccctcttaaggattctgccaagcaacacgagcaaatcttcattggaagaaatggagctgccgcttttgcctccaccagaatcattgcttcctcttaccactacaacgctcagtctgatgttttgccagagccaaccgctgagaatttgaagttggaaccaggtaatgaagacaacttggtcagatacagtagctctactggtcaactgaagcacaattactccatcattattgttactttgactaccactttcatcttaattggtgcagtcttcagagctatcacttgtttcttggaccgtactgttgagactcaatcttggattttcaaaccagttgtcatgtacatgttgtggggattccttgaaactgtcatcaacgttatctacctgttgggtagaattgacttgagattttacagacctgatagattcccaaaggacatgcttgttggtaacgaggctgttgaaccttccccagtcatttccaacaaggaaagaacttcatctatctctgagagaacttctaacccagaaattgtccgtaccgtctaa

SEQ ID NO: 3544 - DNA, 378 bp, Artificial Sequence
  Optimized genes for Pichia pastoris
atgtctgaggaagaagagttgaaggttttcacttttgaagaggttgagcaacacaaggctaacgatgactgttggattgtttacaacggtaaggtctacgatgttacttcttacattgaggagcacccaggtggtgaggaagttatcttggaatgtggtggagctgatgccactgagccattcgacgatattggtcactctgaagatgctcatgagattttggccaagttgctgttgggtagagttgaaggtgctccagtcaaggcctctgtttcttctgcttctactgctgaagactctggttcttccaacaacttgttgttggctgttttggttgccattcttgctggtgttgcttactacttcttcaaccagtga

SEQ ID NO: 3545 - DNA, 879 bp, Artificial Sequence
  Optimized genes for Pichia pastoris
atgccaacccaaatcatggctccatgggctcctgctttggctggatccattgccagagaacttgagaagcaaccattcgtctctttccaatttgctactgtcgatgagcacggttctccacacgtcagaactgttatccacagaggattcttgtttgacgacagatctaccaacgtcttgaccttcaccactgatcgtagaatgaccaagtacaaggagctgttcaacgattctgctttcgagttgtgtttctactctcacgttgctagaaaacaattccgtttgagaggtgtcgcaagatgtattgatgacactaccaccccaaagttgaaattgccaccagacattttcgaccaattgaagaattcagctgaggctaccgtcactttgattgctgacaatgacaacgaaattgagactgacaagattgactacctgaagttcccaagatccactgcttctgacgaattggaatacccattgttgtctcctgaagttattgccaagttggaggcctcttctggtgaggaaggtttggatccagaggagatttccgctcaactgactcctcctactgaagaagaatggaagaacgagagaagaagaatctggaacactctttctcgttctatcaaatctactttcagaaagccaactccaggttccagattgactgaggaaaagatcaagctgttggactctattggtagaggtgttgacggtgcttccgatgaagatggtctggagaacttggttgtcgttgttttgttcgttgataaggttgactttgttgatatcggttacaacggtcaaggtcgtcgtttgatctacagaagactggctggtgaccactggagagagaccgctgtttgtccataa

SEQ ID NO: 3546 - DNA, 1380 bp, Artificial Sequence
  Optimized genes for Pichia pastoris
atgggtaaggagaaattgcacgtcaacgttgtcgttattggacatgttgatgccggtaaatctactaccaccggacacttgatctacaagtgtggaggtattgacaagagaactattgaaaaatttgagaaggaagccgaagagttgggaaagggttccttcaagtatgcttgggttttggacaagttgaaggctgagcgtgagagaggtatcaccattgatattgctttgtggaagttcgaaactccaaagtaccacgttactgtcattgacgctcctggtcacagagattttatcaagaacatgatcactggtacttctcaagctgactgtgctatcttggttatcgcttccggtattggtgagtttgaagctggaatttccaaggatggtcagaccagagagcacgctcttttggccttcactttgggtgttaagcaattgatcgttgccatcaacaagatggattccgtcaaatggtcccaaaaaagatacgaggaaattgtcaaggagacctctaacttcattaagaaggtcggttacaaccctaagaccgttccatttgttccaatttctggatggaacggtgacaacatgattgagccatcttccaactgtgactggtacaaaggttgggaaaaggaaaccaaagccggtggtgctaccaagggaaaaacattgttggaggcaatcgattctattgatcctccttccagaccaactgataagccattgagattgcctttgcaagatgtttacaagattggtggaatcggtaccgtcccagttggaagagtcgagactggagtcatcaaagcaggtatggttgttacctttgctccagctggtgtcaccactgaagttaagtctgttgaaatgcaccatgaacagttggaacaaggtgtaccaggagacaatgtgggtttcaatgtcaagaatgtttctgtgaaagagatcagaagaggtaacgtctgtggtgactctaagaacgatccaccaaaggccgctgaatctttcaacgctcaggttatcattttgaaccatccaggtcaaatctctgctggttatgccccagtcttggattgtcacactgctcacattgcctgtaagtttgatgaattgattgagaagatcgacagacgtactggcaagaagactgaggagaacccaaaattcatcaagtctggtgatgctgccattgttaaacttgttccttctaaaccaatgtgtgttgaggctttcaccgactaccctccattaggtagattcgctgtcagagacatgagacaaactgttgctgttggtgttatcaagtccgttgtgaagactgacaaagctggtaaggttactaaggctgctcaaaaggcagccaagaaataa

SEQ ID NO: 3547 - DNA, 1674 bp, Artificial Sequence
  Optimized genes for Pichia pastoris
atggctccaactgccatcgacttgcaacaagtctctgatgaagactaccaaactaagattaagaaggccacttctccttcttactctgttattgcttccttgggattgaacccagaggctgtcatccgtcacaatgctgctgttcctaccttgtacgaagatggattgttggagaagggaaccgccatttcctccactggtgctttgatggcctactcaggtaaaaagactggtagatctccaaaggacaagagaattgtggatgaggaaacttcaactgaacacatttggtggggtccagtcaacaagaaggtcgatgagctgacttggaagatctccaaagcaagagctattgactacttgagaaccagagagaaaatctacgttatcgatgcctttgctggttgggacccaagatacagaatcaaagtcagagttgtttgtgccagagcctatcatgctctgtttatgaagaacatgttgattagacctactgaagaagagcttcaaaactttggagaaccagatttcaccatctggaacgcaggacaattcccagctaatgttcacactaaaggtatgacttcctctacctcagttgagatcaacttcaagtctatggaaatggttatcttgggtactgagtacgccggtgagatgaagaaaggaatcttcactgtcatgttctacctgatgccaatcagacacaaggttttgactttgcactccagtgccaaccaaggtgtgcagaacaaagatgttactttgttctttggcttgtctggtaccggtaagaccactctttcagctgatccaaacagaaagctgattggtgatgacgagcactgttggtctgacaacggtgttttcaatattgaaggtggatgttacgctaagtgtttggatttgtccggtgaaaaggagccagaaattttcaacgctatcaagttcggttctgtgcttgagaacgttggttacgatcctgttaccaagattgttgattactacgacaagtccattaccgaaaacactcgttgtgcttaccctattgattacattccatctgccttgatcccatgtaccgtcgactctcacccaaaaaacattgtccttcttacttgtgatgctagaggtgttcttccaccaatttctaagttgaccaacgcccaagttatgtaccacttcatttcaggatacacctccaagatggctggaactgaggatggtatcactgagcctgaagctactttctctgcttgtttcggtcaaccattcttggtcttgcatccaatgaaatatgcacaacagttgagtgacaaaatgattcaacatgagtctactgcttggttgctgaacacaggatggactggatcttccgctaccaagggtggttccagatgtccattgaagtacactagaagaattttggactccatccactctggagagttggccaaggctgaatacaagaactacccaacctttggtttgcagattcctaaggaagttccaggtgtcccaacagaaatcctggacccttccaacaactgggttgacggaaaggataatttcaacaccgaggttagaaacttggctcaactgttcatggagaattttgagaagtatgcttctgaatgtactacagaggtcattcaggctggtcctcaattgtaa

SEQ ID NO: 3548 - DNA, 1071 bp, Artificial Sequence
  Optimized genes for Pichia pastoris
atgacctttttcagacgttctttgcaatcttccaagtccaactcaactacttccatttcttctttgtacgccacaccaaactctgttgataccttgactccagagtttgttccagaagttattgatgacgagttgaactccttgcacttcaagttcactaactttgctttggacgatgaggttgtcgatattgcttctgagactgctactgaggcttctggtgttgctaccatgaagacttctccatctctgagaactggatctgacgttaaatggtgtgttttgttggtcggtcttccagcttcaggtaagtctactgttgttagacaattgaaacaatacttgaccactggtaccaagcagaagtgtcgtgttgagatttacaatgctggtaacgtcagaagatctcaacatccaaagagagctgactccggtttctttgaatttggttctacatctaccaacggtagattgagagaaacttttgccagagacactcttgctatgttgttgggtgacttgcagaacgatcatgttgacattggtatcttggatgctactaattcaaccagagagcgtagaaaatctttattggaacaaattcatgctgtttctccttctaccaacattcaaactttgattttggaggtccaatgtactaacaagtccatgagaagattcaatattgagagaaaggctcaaaacgctgattacattcacattccaagagatgttgccgtcaaggacttcttcaacagagttcaagtttacgagtctcactttgagccagtctctgcccaagagcttgcatcattgaagttgccatacttatcaatgatcaacgttggtgaggagatcatctacaacttcgagaacgccaagcaaaccgatttctctcttgaagatccaattttcttgttgatctgttccttcgtcactgaatacagaacccaatatgctccaacttacttgatgactctgaagtctttctacgcctccgagtacgctcctttggtttccaccccattggctttcgctgctacctctgctgagaccgcttccactcagtag

SEQ ID NO: 3549 - DNA, 3966 bp, Artificial Sequence
  Optimized genes for Pichia pastoris
atgtcctccgagaaagaaagcccttctgagagtaaatcttcccaagttttgaatatcccaaagaacgagagagtgaggttgactgttcgtaacttgcaagtcactctgaaagctcagaagaagaagcaatcccttttgaaaagattgagaaagtcagaaaaagacaacactatcgacgaggaggctttgcctcagaaaaagattatctccaacgtcaacctggatttaaaggaaggagagcttattgctattctcggagcttctggtagcggtaagactactcttctgaacaccctttcacaaaaggttaccaagaataagtcgtttttatttagtggtatgattaaatacaacgaaaacaccgacatcgaaagaattagacacgcttacatgtctcagactgattttttccttccaaacttaactgtctacgagactttagactatgctgctaagctgaagttaccaagaaactacaccaatgctgagcgtaccgagctggttgagtccattcttgtcgaattgggtttggacagaatcagagaatcaatcatctgtaactccttcggatccatttacatttccggtggtgagcaaagattggtatcaatggctctgcaattgttgaacaagcctggtctactgttcttggatgaacctaccaccggtttggacgctacttcttcatttagaatcatcaccgctttgcacaagttgtctagaaactttggtatgacaatcgttttaaccattcatcaaccaagatatgaaatcttagaacaaattgacagaatttgtattctaaccagaggttgccgtgtcatctacaacggatctcctttgaactcaattgagtactttaagaacatcggtcacgacattcccagaaatgtcaatttgaccgattatttgttagatatttcttgtaaggactcttcttctccagagaatgagtctcaatctttagcaagaattgaatatcttgcttctaaatgggagaagcacgaaccatccaccctagacgaaggtgttgaagtaatggattctttcacccactccagtaacagtgagaaggccctgactgagatcgagaaacgtattacattaatcaagcagatccgtattttgactaagagaaccttcattctgtccctaagagaccgtggttctatgcttacttttaacttctctatcttgatcatgggagttgcttgtggatggttattcttcaaaccacctgctgacttgggtggtatcagatctatcgtctcccaggtttatgtcgtcttggagttgattggattcgttcctatgatcctggagatcactagactttgggatttcgacggtcaagctttcttgcgtgaaaactctgaaggctatgtgtctgttactggttggatcatttctcgtcgtttagccaaattcccaattgaggactttccaacttccatcttctttgccttgatcacttacttcatgttcggtcttagaacagacaacggtgcttccaatttcttaatctattttgttgtcaccctgtttgtcaacttgtgtgctgttgctctagccactctgtgttttgctgtcggttcagacttcgcttcatcctctttgatgtgtaatgtgatttatcagttgcagaattcttcgtgtggttatttcattaacgctaagaccatgccagtctacgttagatggttgaagtactgtgcccacttctggtacgcttttggttgtctgatgtctaaccagttcactgactggatgggagactgtccaacagagggagatgcctgtgtcgagtattcaggtatctaccaacttgaaattttcggctttggtgaaaattggattactttgccaatctgcgttttgcttgccttttttcttggtactttggtgctttctggatttatccttcgttacaagaacacagaagtttccatgtcaaaagagattacctctaacatgttttccaagagatccaaagatagaaaaaaacatgaggaaaaggatgtcccagctgatgataacttccacgctatctctactgctagaagagagatctcattgaacctttatgtttccaacgtttcattatacgtctatccttccagactgaatctgggtgtctttactattttgtggaagtacatcaacaatagatacttgaaatttggagtggaaaaggtcgagaacactccaaaaagtgccaagtccaagaggctgctgaccaacgttaatgccaagtttattccaggtagattgaatgcaattatgggtccatctggttccggaaagtctaccttattaaactatatcgctggtcgtctgtctaaggagtctaatttttacactacaggtgaggttattgttaacgatatcgctatgagaagtatggacaagccattgaagaaattgtgctcctacgtccttcaaaatgactctgctttaattccaaccttgaccgtcagagagaccgttcactttcaagctcaactgagactaccaaaggaaaaacagattgatggtggaatcgatcgtatcattgacgatttgttgctcaagtttggacttctagattgtcagaacatccctattggtgacgactacacaaagggtatttcgggaggagaacgtaagagagtttctattgtcgttcaattattggatgactccaagatattgttattggatgagccaacttcaggattggacagttttacatcttcctcaattttgtcaactttggaagaatacgccattgaacagaacaaacttatcatcatgaccatccaccaacctaagaaggagatatttgagaagttcggtaacgtggtgttgctggccagaggaggttacgtggtttacaatgattccgccgtcaagattgccgattacttctcatctttgggatacgacgttccaccaatgactaacgtcgctgatttcgtattggacatggtttcgaacaacattgatgagagaccagaagagtcagatgctcgtttgagaagattggttgaaacttggcaagagaaccatgaatctgacttccagagagtccaaaccaacactaccatcaagatcagcaatgaagatcagtttgacgcccaattctcccacttgtatcaaaacagagctgcagacaatgtttctcttcctgttctgattaagcgtctcacattgacaacattcagagatcaaggtgttgttgctgccagactgtaccaggttatggccctttgtgttatccatgctcttttctatgctccattaaaaaatggtgccgacggaatttcaaacagattaggtctgatctttcaggtcctcaatctttactatgccggtttcatcaataacatttccttgttccctcaagttaagcaattgctgtataatgaatgggaagaccaaatctactctctggaatctttctttgcatcatactttttgttggagattcctttcgagctattctgttcctttttgtacgctgtgttcttggtcatggtcattggtttacctagaactgccggaatgttgtttaccactttctacgcctcttttgttgccatgaactgtggtgaaagtttcggtattttattcaatactttgttcaacaagcttgatgttgccatcaacgttctttccaattgtttgattattggcatttttatggctggtgtgatgagtattcacatgcctgagttcttcaaggcttggaactggattaacccactgaagtatattgttggtgtcgttgcaaagttgggttttgctggacaaactttcaagtgtgagattggtgatgaatgtgcattgtccactggtgacgatgtgttaagatactaccgtcttgaccacaacttttctgccttcatgggtgctttggccgtttgtttcgttgtttacagattcgtctcttacgttttcctggctattcgtctaaagatgagctag

SEQ ID NO: 3550 - DNA, 1212 bp, Artificial Sequence
  Optimized genes for Pichia pastoris
atggctggtaacttgaaggacattctttctttatctagaaagactgccagaaacctgaagcaagccttggatgagttggctgagcaagttatcaaccaccaacgtagaagaccagctttggtcagagttcctatcaataacaacttgagacgtaagtctcagcaatctttcttgaacagaagatcattccatttgtggacttccaagtacaatccttacttctggagaggtggtagatctaatgttctggatcaattgaatcgtgaggctctgagatacagatcctcttttgccaagccaggtttctacccttctggtctgtaccaatcaactttccctcaaagaggatccagaatgttcagtacttgtgcttactcttgtcaacaggaggccgttaagaatcttacctccgctgttagagctcttttgcaatccggtgccaactttggttctcaaatgaaacagatgaagcactgttcccaaaagaagaaacatttctctaagttctccaagagattgacttcatccaccgctgctggatctggtaagaacgctgaacaagctccatctggattggcagagggtagtgctgtcgtcttctcattggagagacagtctcacaacactgagcttgaaggtattttggaccaagagacctcttccattctggaagaagagatggttcaacatgaaagacatcttgctatcatcagagaggagattcagagaatttccgagaatttgggttccttgccattgatcatgtctggtcacaagattgaagttttcttcccaaactgtgacactgtcaagtgtgagcagttgatgagagacttggccattaccaagggtgttgttagaagacacgactctactgctgagcactcctccagtcgttcatttgttccagaagactgtttgtactcaagtggttcatcatctcctaaccctttgtcctcaaccagttccaaatcctttgacagagtctctctggactacatttcttctcgttctacatctgaccagaccactggttctgagtacacttctttgtcacaacaataccacttggtttccaactacaacccagtcttgtcttctgctcctggttcgtcccgtgttcttgagctgaacaccccagagtctaccatggaaggatccactgatttggaatacttgaccagagatgatgttttgctgttgaacgtttaa

SEQ ID NO: 3551 - DNA, 336 bp, Artificial Sequence
  Optimized genes for Pichia pastoris
atgttgattccaaaggaagacagaaagaagattcatcaacatttgttccaagagggtgttgtcgttgccaagaaggactttgaaattcaacacgaggagattggtaccaagaacttgtacgttatcaaggctttgcaatctttgacttccaagggttacgtcaagacccaattctcttggcaatactattactactctcttactgatgatggtttggagtacttgagagagtatttgaacattcctgaaggtattgttcctaagactttgttgcaggagccagttccagagagattgccaagaagaggtggtgagcgtagattcaccagaaactaa

SEQ ID NO: 3552 - DNA, 717 bp, Artificial Sequence
  Optimized genes for Pichia pastoris
atgaaattgaacattgcttttccagctaacggtactcaaaagtgtattgagattgatgatgagcacaagttgcaagctttctacgagaagagaatgggtcaagaggttgaaggtgactctgtttctgacgagttcaaaggttacgttttcaagatcactggtggtaacgataaacaaggattcccaatgaagcagggtgttatgcacccaaccagagtccgtcttttgttgtccaagggtcactcttgttacagaccaagaagagttggtgaaagaaaaagaaagtctgtcagaggttgcattgttgctgctgatttgtctgttttgtcattggtcgttgttcgtcaaggtgagcaacaaattgaaggattgactgatgcccaagttccaaagaaattgggtcctaagcgtgccaacaacatcagaaagttcttcggtttgaccaaggaagacgatgttagacaatttgttattcgtagagaagttgtcaagggagacaagacttacactaaggctccaaaaatccaaagattgatcaccccagagagaattcaacgtaagcaacacttgagagagttgaagtacgaaaacgctagaagacagaaggatgctgccgctgagtacgccaagctgttggctgaaaagattcatcagagaaacgccgagaaagctgagatcaagaagagaagagcttcttctttgcgtgctgaagcttaa

SEQ ID NO: 3553 - DNA, 2493 bp, Artificial Sequence
  Optimized genes for Pichia pastoris
atggttaacgagaagaagcctctgttggacgcctctggaactgaaaatggacctgaggacttgaccgccaccgctattttgaggaagaagaagaaagacaatgctctgattgttgacgacgctatctctgacgacaactctgttattggcatgtcctcaaacaccatggaacttttgcagttgttcagaggtgacactgttttggtcaagggaaagaagagaaaagatacagtgcttatcgttttagctgacgatgatattgaagacggagcttgtcgtgtcaacagagttgtcagaaacaatttgcgtgttagactgggagatattgtcaccgttcatccatgtccagatatcaagtacgcttccagaatttctgtgttgccaatcgctgatactattgagggattgactggatctttgtttgatgtctacctgaagccatactttgttgaagcctacagacctgttcgtaagggtgacactttcactgtgagaggaggaatgagacaagtcgagtttaaggttatggacgttgaaccagatcaatatgctattgtggctcaagataccgtcattcattcagaaggtgagcctttgaaccgtgaggatgaagaaaacaacatcaatgaggtcggttacgacgatataggtggatgtagaaagcaaatggcccagattagagagctggtggagttaccattaagacaccctcaactgttcaaggccatcggtatcaaaccaccaaagggaattctgatgtatggtcctccaggtactggtaagactttgatggctagagctgtcgctaacgaaaccggtgccttcttctttttgatcaacggaccagagatcatgtctaaaatggctggtgaatctgaaagtaacttgagaagtgctttcgaggaagcagagaagaacgctccttccatcatcttcattgacgaaatcgactctattgcacctaagcgtgacaagaccaatggtgaggttgagagaagagtggtttctcaattacttactttaatggacggtatgaaggcaagatctaacattgttgttatcgccgccactaaccgaccaaactccattgacccagcattgagaagatttggtagattcgatagagaagtcgacattggtattccagatgttactggtcgtctggaatgtttgagaatccacactaagaacatgaagttggctgaagatattgatttggaatcgatcgcacaggaaactcacggttatgttggtgcagacattgcttctctgtgttctgaggctgccatgcaacagatccgtgaaaagatggatctgatcgacctggatgaagacaccatcgatgctgaagttcttgactccttgggtgtcactatggagaacttccgttttgctttgggaaattccaacccatctgctcttagagagaccgttgtggaatctgtcaatgtcacatgggatgacatcggtggtttggattctatcaagaatgaattgaaggagactgttgagtacccagtcttgcacccagaccaatttgccaagtttggactttctccttctaaaggtgttctgtttttcggtcctcctggtaccggaaaaacattattggccaaggctgttgctactgaggtgtctgccaactttatttccgttaagggcccagaactgctttccatgtacttcggtgaatccgagtcaaatatcagagacattttcgacaaagccagagccgctgctccaactgtcgtcttcttggatgagcttgattccattgccaaggctcgtggtaactcattgggtgatgccggaggtgcttcagacagagtcgttaaccaattgctgaccgaaatggatggtatgaacgccaaaaaaaacgttttcatcattggagcaaccaacagaccagaccaaattgaccctgctattcttcgtccaggaagattggaccagttgatttacgttccattgcctgacgagccagcccgtttgtccattttacaagctcagctgagaaagtctccaattgagccaggtctggaccttcaagaaattgctaagattaccaagggtttctctggtgccgacttgtcttacattgctcaaagagcagctaaattcgccattaaggactcaattgatgcacaaaagaggttgttggaggagaaagctacccacaagctggagtctagtgaagatatcgagatgaccgaggccaagcaggatggagaagaggttgatgatccagttccttttatctcccacattcacttccaagaggctatgaaaactgctaagagatccgtctctgatgctgagttgcgaagatacgaagcttacgcccaacaattgcaatcttctagaggtcaattcaccgatttcaagttcaacgatcttggagagtccgctggaaacggtggttctattggtgctgagtcttccggtccagcttttggtaacgtcgaacctgatgatgacgatttgtactcttag

SEQ ID NO: 3554 - DNA, 402 bp, Artificial Sequence
  Optimized genes for Pichia pastoris
atgtcagccccaacagttgaagtggaagagttgaactggcgtttggttgaagtcggtagagttgtgctgatcaacaacaagctagctgccattgtcgatattattgatcaaaagagagttttggttgacggaccttcaactgatgtagagagacaagtcgctagactgcaggatatcgagcttaccttcttggtacttgattctgtttctagaggtgacaattccgatgcagttaaggaggcttgggacgcttctgacatatccagccaatgggcttcctctgattgggcaaaggacattgctcaaaaacagaggcgatcggaattaaatgacttcgagcgttttcaagtccagctcttacagaagcaaagatctttggctatcggtagtgccgccaaataa

SEQ ID NO: 3555 - DNA, 1422 bp, Artificial Sequence
  Optimized genes for Pichia pastoris
atggtcgaaggtaacgttcttgtgatatctaatcgtgtaccagtaactataaagaagggttctgacggtaactatcaatacaacatgtcctcaggcggtttagttactgctttacaaggcttgaagcagaagttccaatggtttgggtggccaggactggaagttccagccattgaccaagagaaagttaactccgacttgaaggaaaagtttaattgctttccgatttatctatccgatgagatcgcggagctgcactacaatggattcagtaactcaatcctatggcctttgtttcattaccatccaggagaaatgaattttgacgaagctgcctgggctgcatatatcgaggctaacagacagttttgtaaggttattgtaggtaagatcgccgacaatgatttagtctggatccacgattaccatcttatgcttttgccacaaatgttgcgtcgacagattgacgagcagggcctgaagaatgttagactgggtttcttcttgcacactcctttcccatcttccgagatctacagaatcttgccagtcagaaaggaaatccttgagggagtcctatcatgtgacttgattggtttccatacctacgactacgcaagacactttacaagttccgttgaaagaattctgggatgtagaacaactcctactggtttgacttatggttctcacaacgtctctgttggtgcttaccctattggtattgatgttgataagtttaccacaggtattaagcaacatttagtgcaagagagaatccactctctccaaaagagattcggtcagggtgttaaattgattgtcggcgttgatcgcttggattacataaaaggtgttccccagaaactgcacgcttttgaaatcttcttgcaggagcacccagaatggattgggaaagtcgttttggttcaagttgccgtcccttcaagaggagatgtcgaagagtaccaaacgttacgtgctactgtcaatgagttggtcggaaggatcaacggtcaattcggaaccattgaattcgttccaatccatttcatgcataaaagcgttcctttcgaagaactcatttctctttatgccgtgtctgacatttgcttggtgtcctcgacccgtgatggtatgaacctggtctcttatgaatacatcgcatgtcagcaacaaaaaaagggttctttaatcctctccgagtttgctggtgcagctcaatccctaaacggagccattgttgtaaacccctggaacaccgaagagctttctgaggctatttacgaggctttgagcttgcctgaagagaagagagaatctagtttcgagtcgatgtttaaatatatttcaaagtacaccgctgcctattggggtgagaatttcgtgaaggagcttactagggtgggaaacaacatgtaa

SEQ ID NO: 3556 - DNA, 2691 bp, Artificial Sequence
  Optimized genes for Pichia pastoris
atgtcagctgaagaaccaacgaaggagaagatcccaattaatcatagtgacgacgaggatgaagatatcgaccaattgattgaagatcttcaatctgtacacgggtttgacgacgaggaggaggaagaacaccacgagggtgctaccgctaaaccagttcctgaggagttgttgcagaccgatcctgcatacggactcacaaccgatgaagtccataagaggcgtaagcgattcggagagaataagatggcagaggagaaggagaatttgctagtcaagttctgtatgttttttgttggtccgatccaatttgtcatggaggcagcagctatccttgctgctggtttggaagactgggttgatttcggtgtaatattggctcttttgttcttgaacgcttccgttggttttatacaagagtaccaagctggttctattgttgatgagttaaagaagacgttggccaacagtgcaactgtcattagagacggtcaagttgttgacattttagccgatgaggtagttcctggagatattcttaaattggaggacggtgttgttatcccagcagatggtagattggtgtctgaggaatgctttttgcaagtcgatcaatctgccattaccggagaatccttagctgttgacaagaaaactggagattctacttattcatccagcactgttaagaggggtgaggcctacatggtagtcactgccaccggtgattctacgttcgtcggaagagctgctgccttagtgaacaaggctagtgccggacaaggacacttcaccgaggttctcaacggcataggaactatattgttggttttggttatcgccactcttctggtcgtttgggtagcctgcttctacagaacttcaccaattgtaagaatcctgagattcaccttggctattaccattgttggtgtccctgttggcctcccagctgttgtaaccactactatggccgtgggtgcttcttacttagcaaagaagcaagctattgtacaaaagttatcggccatcgaatctttggctggtgttgagattttatgttcggacaagactggtacactaaccaagaacaagttgtcactgcatgaaccttataccgttgaaggtgtggaagctgacgaccttatgctgactgcttgcctggctgcgtcccgaaaaaaaaaaggtttggacgcaatcgacaaggctttcttaaaaagcttgatttcttaccctagagcaaaggccgccctaacgaaatacaaagtcattgaattccagccttttgatcccgtctctaagaaagtgaccgcctacgtggaatcgccagaaggtgagagaattatctgtgtcaagggcgccccactctttgtccttaagactgtcgaagaggaccacccaatccctgaagatgtccatgataattacgaaaacaaggtcgctgagttcgcttctagaggctttcggtcactgggagttgctcgtaagagaggacagggtcactgggaaatcttgggtattatgccctgtatggatccaccgagagacgacaccgctcaaactgtgaatgaggctacccatttgggactccgtgtcaagatgctgactggtgacgctgtcggaattgctaaggagacatgtagacagcttggattggggacaaacatctataacgcggagcgtttgggcttagggggtgctggtgatatgcccggttcggaaattgccgatttcgttgagaatgctgacggatttgcagaagtcttccctcaacacaaatataatgtggttgagattcttcagcagaggggttacttggtcgctatgactggtgacggagttaatgatgctccatccttaaaaaaagcagatactggtattgccgttgaaggagcctcagatgcagcacgttccgcggccgatattgttttcttggcacctggactttctgccattattgacgctcttaagacatctagacaaatcttccatagaatgtattcctacgtcgtttatagaatcgccctgagcctgcatttggaattgtttctaggtctgtggatcgctatcatgaaccgttctctgaacatcgacctggtggtgtttattgccatttttgctgatgttgctaccctggccatcgcatatgacaacgctccttactctccaaagcccactaagtggaacctaccaagactttggggcatgtccattattcttggtatcatcttggctatcggtacatggataaccttgactacaatgctactgccacgtggcggaatcattcaaaacttcggttctgttgatggtgtgttgttcttggagatcagtcttactgaaaattggttgattttcatcactagagccgccggtcctttttggtcctcttgtccaagttgggaactagctggagctgtgattatcgtcgacattattgctactatgtttacattatttggttggtggtcacagaactggactgacattgttaccgttgtccgcgtttggattttctctttcggtgttttctgtgttatgggtggtgcttattacttgatgtccgaatcagaaggttttgatagattgatgaacgggaaacctagaaaagagccaccaccacagcgttccatggaagatttcattgtcgccatgcagagagtttctacacagcacgagaagtccggttaa

SEQ ID NO: 3557 - DNA, 6210 bp, Artificial Sequence
  Optimized genes for Pichia pastoris
atgtctgctacttctggagttgtcaacagacctctggtcttaaaccatggttccattgagtccacaatcttgatcccaactaccgaataccatttctatcagactcttcttgagggtttcagaaagagcttgcctcaagttacggaaggttttgctgacgatgatgaaccctcttccaaggctgaattgcttatgaagtttttaggttatatcgttcaatctggagtctccaaccagcaagaacaattggctgcagctaaattagtcctgaatgaattcgagtccagattcttgcagggtttgaatttacactcctacgctgctattttgctcaaatctgaaactttcccaacaaccctgctcaagattaaagagaatttgatcaagaattactacctcggtagagcattagtttacttgcccggacaacgcggtttggtttacccaccatctgctctgttaaacgctggaaaatccggctccgcccaaatttacgctatctttggtggtcagggtaacactgacgactattttgaggaattgagagatatctatcacatttaccaaggattagtttccgactttgttaccaaagctcaattgaagttgcaagagcttattagaacaactccagagaccgatagaatctatacacaaggactggaccttataaactggttggagaacaaggacaaaaccccagatcagcaacagctgttgtctatccccatgtcctgtccattgatttgtgttattcagctttgccattatatcgtaacctgtagaatcctgggcattactccaggtcagttgcgtgacagcctgaagggtaccactggacattcccagggtttagttactgctgttgtcgtttcttctgctgactcatgggaaagtttcgaaaagctggctttacaggcagtggaatttatgttttacattggtgtgagaggactccagacctatccaaacacttcgttgccaccatcgattgttcaggactctgaagaaaacgcggagggtacccctagtcctatgttatcggttcgtgacctcagctatgatcagcttgttaagttcgtaaacgaaaccaatcaacatttgccggaagctaagcatattgacatttcattaattaacggaccccgtaatgttgtccttaccggaccaccccaatcactctatggattgaacttgaatttgagaaaggctaaggcgccatcaggtttggaccaggccagaattccgtttagcgagagaaagttgagattttccaatcggttcctaccaatcatgtctcctttccattctcacttgttgtctccatcaactgagaagattgtagcagacctaaaaaaagccggagtagagttcagtcaatcctctatgaaactgcctgtttttgatacttatgatggtaaggacttgcgatcgtattctggctcaatagccgctcgtctggtcgagtgtatcacaaaattgagagtcaattgggagctgtctactgaattcaactcaacccatgttctggattttggtcctggtggcgctagtggtttgggtgtcttgacacacagaaacaaggagggtactggatctcgagtcatcgtcgctggtgtgttggacgctgaatccgaagattcggagtttggttacaagcaagaaatattcgagagtaacgagaaggctatcaagtacgccccaaactggctaaaggaatacaagcctaagcttgtgaagacttcagcaggaaagattttcgttgatactaaatttagccgtttgctggggcgtgctcctttgatggttccaggtatgacccctactactgtatctcctgactttgtggctgcaacgttaaacgctggcttccacacggagattgcaggtggtggttatttcgctccttccattatgaaggctgcacttcaacgcgttattgaccaggtcacgcctggtacaggtgtcggtatcaatttgatttacgtcaaccctcgtatgttacaatggggaattcctatgattaaggagctgagagaacaaggttttccaatccaatctttgtctatcggtgccggtgtaccttcattagaagttgctactgagtacatagagaccctgggtttggcccatttaggtttgaagccaggttccattgacgctgttaaccaggttattactattgctaaagcccacccaaacttccctattgtattacagtggactggcggtagaggaggtggtcatcattcgttcgaagactttcaccaacctatcttgcaaatgtactccaagattagaaagtgtaagaatattattctgattgctggttcaggttttggttccgctgaagacacgtatccatacttgactggatcttggtctcaccagttttcctacccatcgatgccttttgacggcgtcctgttcggttccagagtaatgactgccaaagaggccaagacctctcctgccgctaaacaagccattgctgactgtaccggagttgacaattcccaatgggagaacacatacaaaaaaccgactgggggaatcattaccgtgaggtcggagatgggtgagccgatccacaaaattgctaccagaggagtcatgttgtggaaggagttggacgatactatcttcacattgccaaaaaacaagatgttggaagcaattgccaagaagaaggattacataattaagaaactcaatgccgactaccagaagccctggttcgccaagaacgaaaaaggaacatgtgatcttgaagatatgacttataagcaaatcgcagaacgtctcgtcgagttgatgtacgtccgaaaatctcagagatggatcgatgttaccctaagaaacttcactggtaagttcctgcgtagaattgaagagcgattcgctaccaaggtcggtaccatttctctcattcagaatttctctcaacttgaggaaccggagaaggctattgattctgtgttcaaagcttatccagaagctgcttcacaactgatcaatgaggaggattgtgattggttcctgcttgaagcacaaagtcctacccaaaagcctgttcccttcattccagttttggacgagcgtttcgaattcttcttcaagaaggactccctatggcaatccgaggatttggaggctgttgtgggtgaggatgtccaaagaacatgtattcttcacggtccagttgccgcccaattctcgaacaaagttgatgagccaattaaagatattttggaaaacattcacaagggacatattaagagcttggttaaagaggtttataacggagatgaatccaagattccagtcgtcgagtatttctcttccgtcgactcttttagtgatacggccattgagggtgtaaagatcgagcgttctcgtaatacggaaacattcacagtaacttctggaaacgtggataaccaacagtggtttgatctactggctggcaaggaattgagctggagaagagcctttattactgcagccaggttagtccaaggtactaattttgtatctaatccagctcattcggtccttgctccatcaaaagatcttgttgtcaagattgagaacggctcagacgccaagaagactgtgcttactgcattccaaagggttagaggtaagtatgtccctgctgtttctttgaagagcattggtgatttaaagatcaaacttgagctaattgaaacgagaactgcagataagtccgccgtcgctctagagttgttctacaactacaaaccaaccgacggtttcgccccaattttggaagtcatggaaggtcgtaacacatcaatcaagaatttttactggaaattgtggttcggtagttctgttcctgtagatcttgacttcgatgccaataaaccaatttctggaggtgaggcaagtgtttcttcccaagctatagccgaattcactcatgctgtgggcaactcatgcgaggatttcgttcccagagctggtagaccacaactagcaccaatggactttgccatcgtgttgggttggaaagcgatcatgaaagctatatttccaaagactgtagacggtgatattcttaaacttgttcacctttccaacggctacaagatgtttcctggcgctgatccacttaagaagggagacgtcgtctccaccgttgcacacatcaggagtgttgtgaacggtgagactggaaagaccgttgaggttgttggagtgatctcaagagatggtaaacctgttctagaagttaactctcaatttttttaccgtggtaagtatcaagactttggtaactctttcaagaagaccactgaaactcccgtccaagtcgcttttaagtctgctaaggacatcgctgttttaaagtcaaaggaatggtttcatctggagaaagacatcgacttgctgaatcaaaccttgactttcagatgtgaatcctacgttaaattcaagtcttctactgttttcgcctctgtgaagactaccggacaggcactcttggagctaccatctaaggagatcatccaagttgctgaaatcaactacgaaagcggaagttcttacggaaacccagtccttgattaccttactaggcacggaagtacaattgagcaaccaattatgtttgaaaatgccattccactggctcagggtaccgagttgacctcaaaggcccccggaactaacgaaacatatgctgccgtctctggagattacaacccaatacacgtgaacaaggttttcgcgtcctacgccaacttgccaggaactataacacacgggatgtacagttccgctgctgtcagggctctggttgagcaatgggctgcccaaaatgttgccactagagttagagccttcaaggcagactttgtcgggatggtactgccaaacgacgaacttgttacgcacttagagcacgttggaatgatcaatggacgtaaaatcattaaggtggagactaaaaaagtcgaaaccgaagaagtcgtattgattggagaggctgagatcgagcagccagtttccacttttgtcttcactggacagggttctcaagaacaggggatgggtatggatctttataattcttccgaggttgcaaagtcagtttgggatagagccgatgtacattttatcaataactacgggttctccatcttggatattgtgaaaaataaccctactgaactaaccgttcacttcggtggtgccaagggtagatcaatcagaaataactacattagtatgatgttcgaaacagttgctgcagacggacaacttaagtctgaaaagattttcaaggaaataaatgaggacacaatctcatttaccttcaagtccccgactggtctgctctcggctacccagtttacccagcctgctctgactttaatggagaaggcttcatttgaggacatgaaatctaaaggtttagtcccttccgagtctatgtttgcaggtcattctctaggggaatactcagccctgacatccttgggtgatgtcatgccaatcgaatctttggttgacgtggttttctatagaggtatgactatgcaggtcgccgtcccaagagacgagcagggtagatctaactatggtatgattgctgttaatccaagccgtgtgtctagtaccttcaacgactcagccttaaggttcgttgttgagcatatcgctcaacaaaccggctggttgttggaaattgtgaactacaacgttgagaacacacagtacgtcgccgcaggagatttgagaggcttggatactttatcgaacgtgctgaatgtgtttaagatccagaagattgatattgtaaagttgcaagaaaccatctcactagatgaagtgaaggttcacttaagcgaaatagtcgacgaagtttccaagaagtcttcatctaagccacaacctatcgatcttgagagaggttttgcgtgcatccctctcaagggtattagtgttccatttcacagtagttaccttagatctggtgttaagcctttccaaacttttctatgcaaaaagatccctaagtctgctgtcaaacctgctaacttgatcggtaaatacatccccaacttgaccgccaagccttttcaattgaccaaagagtatttcgaagatgtctacgaattgacaaaatccgaaaagattaaacacatcttggaccactgggaggagtacgaatcatcgtaa

SEQ ID NO: 3558 - DNA, 1755 bp, Artificial Sequence
  Optimized genes for Pichia pastoris
atgtctgacaagaagacctccgtcgaggctgttatcactgaagtcgactcctctccagcctacgaagctggttctattaagtctgaaaacaagagaaacttcgttcaaaattggtttgacgggtttaaaccttacgagatggaagagttggatccaaacctatcagaggtagagaaggctgctattgcaaccgctaatgctcctttgcaacgaaagttgaaaaacaggcatttgcaaatgatcgctattggtggatcaatcggaactggtttgtttgttggctctggtaaggccctcgctgcagctggacctgctgccttgttaattgcttggggtcttaccggcattatgatctatttcactgttcaagccttaggtgagctaagtgtcacgatgcctgtttccggttcattcgctgtttactccacacgtttcattgatccatcctggggttgcgctatgggatttaactacgcgatgcagtggctaattgttttgccacttgagttagttgctgcatcaatcactctgtcttactgggaaggctctaagtcagtcaatgctgacgtgtgggttttgatcttttatttgttgattgttgtgattaatctgtttggggtcaagggatatggtgaggccgaatttgtcttctcgctgataaaagtgatcacggtcatagctttcattttcatgggaatcatcttaaactgtggtggtggtcctaagggtgagtacattggtggtagatactggaagaatcctggtgcctttaacaccgagtataacccatttaaagcagtttgttccgtcttcgtaactagtgccttctcatttgccggtactgagctggtaggtcttgctgctgctgaagctaccaaccctagaaagtcgttgccgaccgctatcaagcaagttttttggagaattatgctcttctacataatctcgttgacattgattggacttcttgtcccattcaatgatcccagactgatcggttccagttcagtggatgcatccgcctctccatttgttattgcgattgtctccaacggtatccatggtttggactccgttatgaacgtcgttattatgattgcagttctttctgttggtaactctgccgtatacggttctagtagaattctgcaaagccttgctgcccaaggacaggctccaaaaattctaggatatatcgatcgtgaaggtagacccttggctgccatcggattgactctcttgttcggttgtttggcctttgttgccgcctcaccaaagcagggagaaatgttcgattggcttttggctttatcgggtctttcttctatcttcacttggggcagcatctgtttgtctcacataagattccgtgcctgtttaaagtctctgggcagaggaacaaatgaactagtgttcactgctcagggtggaattattggaagctggatcgggctgattattaactgtttggtcctgattgtgtccttttgggtcgcagccttcccattaggtgataagtcttctgcagaaggattcttcaaggcatatttgaccgttcctgttgtgattattgtgtacgtcattcacaagatcgttaaaaagaattggtgcttgtacgtcaaattgaacgaaatggacgttgacagtggtaggcgtgatttcgaccttgagctcctgaagcaggagatcgtagaagagaaagaaactttagctcgcaaaccattttggtacagaacctataaattttggtgctaa

SEQ ID NO: 3559 - DNA, 1362 bp, Artificial Sequence
  Optimized genes for Pichia pastoris
atgtcctttgggaaccactattacttcccagtatcaaccacgtcattcccaaagtggatagatcgcatcatgacttcgaacattaatggatctctgcctcaaagtgctaatgttgttgttattggtagcggatttgctggaactgctgtgagctattacttgcagaacgagattgctggagaccagtccatcgttatgttagaggctagagctgccgtttccggtgctacatcaagaaactctggtctgataaaacctgaatatcacagaaaccatggtgagtacgtagataaattcggttcgaaggttgctggtcagctcgtaaactttgaggtcgacaacatgaaggaattggcacgtattctgactttggattctgatttgaacgaaaaggccgatttccaggaaaggatccatcttgacgcttactccaacccaagaagcagtgaaaccgctattaacgacttttacgcctttatggagaacgaagaagtctctgtcgatttgaaaaggaaggttcagattcttttcggtgatcttgccaaacaactgtccaacgttcctactacccctttcgtgattcactacccaaatggttccgttaattcttacgacttcgttaccgctatgttaacaagagcaatccaaaaaggtcttgctttgtacactaacaccttagtcgaggaggtgcaacaattggactctggagtttggaaggtttctacatctagaggcgagttgttcgctgacaaggttgtctttacgacaaacgcttacactcaaggattgttgccagagttttcaaagtctattatcccaatcagaggcgtttcatctcaagtgaacgtgcgtaatactggtaatgagcattctctgtcgatcggttccgatatttatgtcccccaaagtaaaaatttgttgtatagttccttaggtgagcttgaaaaacagactaacttcatggcaaattacaatacagttgacgattccaccgtatcctcccaatctctagagtatctccaaaagaacctaggtaaggtcaattctttggccactgctactgccacctcttcgtcttctggtattatggcctacactgacgatcacttcccctacgtcggtcaattgtcagaattaggaaagcttaatgcttatatcttagccggttgtaactgctcaggcctctctcgtatgttgctgtgtgcaaaggaactagcaaagtccgttgcgctgggttcagaattgagtgatcgagtcccagccccgtacaaggtcaccagagagagaatgggattggtcgacaagcttatgcagtctgtgctgaacgagcgtgaaattagagaaactagagccagactataa

SEQ ID NO: 3560 - DNA, 1086 bp, Artificial Sequence
  Optimized genes for Pichia pastoris
atgccagaccaattatccttcttgaagagaaaaacaggtgtgatcgttggtgatgatgtcagaaacttgtttttgcatgctcagaagaaaggtttcgcgattccagccattaacgttacgtcttcttctactgctgtcgccgcccttgaggcagccagagacaacaactctccaatcatccttcagacttcccaaggaggtgcagcttatttcgccgggaaaggagtgaagaactccaaccaagaagcatcaattggtggtgccgtcgctgctgcccattatattcgttccgttgctccattgtatggcataccagttattttgcacaccgaccactgcgccaagaagttgctgccttggttcgagggattcttggctgctgatgaggcctattacaaagaacacggtgaacctctcttcagctctcacatgcttgacctgtcagaggaatcagacgatgagaacatcgctacatgtgtaaagtactttaaaaggatggctaagatgaatcaatggttagaaatggagatcggaattaccggtggtgaagaagatggtgttaataatgaaaatgctgataaggaacttttgtacaccaagccagagaccgttttcgcagttcataaggcactggctcctatttctcctaacttttcaattgctgcagcttttggtaatgttcatggtgtctataagccaggtaacgtggtcttacgtccttcgttgttaggagatcaccaaaaatacgccaaggagcagttgaaaagtgaaagtgataagcccctcttcctagttttccacggtggttctggttccactcaggaagagtttgacactgggataagaaacggcgttgtcaaggtgaatctagacactgactgtcaatacgcttacttgattggaattagagattacgttcttaaaaagaaggattacatcatgtcgcaagtaggaaacccggagggcgatgacaagcctaacaaaaagtactttgaccccagagtttgggtccgagaaggagagaagactatgtctgctagagtcaccgaggctctgaatatctttcatacagccaaccagctgtaa

SEQ ID NO: 3561 - DNA, 1374 bp, Artificial Sequence
  Optimized genes for Pichia pastoris
atggtgcagcctcaggagcccgaattcgaacaagcttacaatgagctactttccactatacaagactcaaccctttttgagaaaaagccagaatataaaaaggttattgatgttgtttctattccggagcgtgttgtccaatttagggtggtctgggagaatgataagggtgaattggaagttaatagaggttacagagtgcaattcaactcggctctgggtccttacaagggaggtttgcgtttccatccaacagtaaacttgagtattttgaagttcctaggttacgagcagattttcaagaatgctttaactggactcaacattggaggtggtaagggaggtgcagatttcaatcctaagggtcgatcagataacgaaatcagaagattttgttatgcttttatgtccgagttaagtagacacattggtcagttcactgacgtcccagcaggtgacattggggtgggtggaagagaagtcggattcctttttggtgcatataaaaaaatcaagaactcctgggaaggtgttcttaccggtaagggtttaacatggggtggctccctgatcagaccagaggcgaccgggtatggactggtttactacgtcgaaaaaatgattgagcatgctactcaaggaaaagagtcttttaagggaaagaaagttgctatctctggatctggtaacgtggctcagtatgctgctttgaaggtcatcgagttgggtggaatcgttgtgtccctgtctgactctaagggatctataattgctccaaacggtattacaacgcagcagatcagcgccattgctgaagccaagttgaaatttaaatcattggaagaaatcactggatcttactcagctttctctgactccccagttaaatatatccctggtgctcgtccttgggtacacgttggcgatattgacgtcgccttgccatctgccactcaaaatgaaatttcaggtgaggaagcaaaagcattggttgctgcagggtgtaagtacgttgccgaaggttcgaacatgggttcaactttggaggccatcgatgtatttgagggcgaaagagcctcctccagtggtaccgctgtctggtacgcccctggcaaggctgctaactgtggtggtgttgctgtttctggccttgagatgggacaaaattcccaaagagtccaatggactgaagaggaggtagatcaaaagctgaaggacattatgatcaattgtttcgacaactgcctcaacaccgctattgcctactcgagcgagaccaacaaggatagtttaccatctttggttaagggtgccaacatcgcaggatttgtcaaggtcgccgacgccatgtacgctcaaggtgatgttttctaa

SEQ ID NO: 3562 - DNA, 1227 bp, Artificial Sequence
  Optimized genes for Pichia pastoris
atgactgagtcagctttctcaatttcccatttacatgttatcacccccactttcatgcacgtattgaagtataagtacccagaatactctacccctaagtcttcctttttgctctttttccaaagtcttttgtatatagagtccatggtttccaagaccgctcaaattttggctggtgctgccgttgtcggaactggactaatcctttaccagcagaagaagcaagagaaactccaaactcctatcagtagtggtagatctggcaacaacccagtgactgtgggatccgggattgcccctgctgttgacaaccacacacgttggtcacagagcccggaatcaaagtttatttctaccaagtcactgggtggtccaccagctaagcaagatgcatacaatgatgcccgctatcaattcgaacaagctcaacaaaagtttgaagacacaaaggctagttggtggcaatggggacaacagaaatccgatgaggtatctagagaatctgagaaacagtacgaaatcgctaaggcaaagttggaagacgccactcagagcttgcgtgaacagggtcaggacgcattagatactgccgattctcagtaccaaacatggaaatcgcaatggcaatcaaagctgaatgacgctaaggagaaaactgatgatttggtctctcaagccaaggagcaaaccaagtccttctcttcggaagctagatcgaagcttgataagtttagacaagagttcaactctaagaaagaagaattgcgaaagaaatatgcgcacttgtccgaggaggaattggatggaaaggctttcgagtctttgcgtggttggggtgaaagcgccgaggcatttgcaagagaagagtacttagaatctaagaggaacgccgctgaaaccagatccacactacagagaggttacgatctgtcacaacaaaaactgaaagaggctcaggatgaatttaatagaaccaaaaaagcatggttctcttggggcaaggaccaaaacgaggaggctcataacttggcctcacgtaagcttgccgaggcccagaaatcctttgatgatgcttctaagcaattagaccagttcacgtcctcggttgctaaatccgctaaggacaattctgacttcgttgtccaaaagactaaggagggtctggacgtcgctaatgacaaggctcaggacggtcttagttctgtttctaactggattaggaaataa

SEQ ID NO: 3563 - DNA, 1131 bp, Artificial Sequence
  Optimized genes for Pichia pastoris
atgtacatccctccaacctctttcaacagaaaacaatttaagtactctggggacaactataacactccctctgagttcaaggagcaagccagactggacattcatagaaaattggctcaggctcaaagtaatttgagacacggttcttctccgttggctactaaatctattactgcttcctcgtcacagttctctggttccgatgtggagtcattagcttctgtcgcgtcagatggaagcgaaatgactattgacgaatccaaaagaaaaagaaaagcttatcttggctttttaaagaagcctgagtccaaactctcaagaactacgacccgtagatcttccctgttctctaataacttgactcaacagcccactaatcagaccgaagctacatcgctattcaccaattacttcagtgataatggttttgttaccgaggttgacttgaacgaggtcttgcctaagaattttgacgatatgtacgatcctgatcttacagtagagaggttctacaacggtagaccagtttttacaaagagaaacctcgttaactgggaattaaatgatttgcgttcactacttatagtctcagaactgaagccagagtggggaggttacatccctagaattagagacaacccagacttccatatcgttctgcttccactgactagtagcgacaatgagtttattgaaattttgatgcgttccgatatttacaaggaatccaagttttctaaggaattcaagatgaagaccgctgcctatattgttcaaagcgccagatatcgtcacaacctagctatccaggccaggtattctgatatgccaactaaggacccaacgcttcaatacttcagtaaggtcgaatggcgaaatattatcgagaactacttgctgaacttgggtgtggagacccaatgccgcttagactttcaacatcgttgttctatattgaaaggtcacccagcacaaaagaacgatttgttgtctaaggcaatcttgaacaacactcagaagcaattcaacggtaatggactttccaaagaggaaaaggcaagaatttggtcccaagcccagtcggaaatctacaagagattaggattggattggacccctgacaagatctaa

SEQ ID NO: 3564 - DNA, 573 bp, Artificial Sequence
  Optimized genes for Pichia pastoris
atgtgggtcctgaattggttccaagacgtcttagcctcgcttggtttgtggaacaagcatgctaagctcttgttcttgggcttggataatgcaggtaaaaccactttattgcacatgttgaagaacgatcgtttggctacgttgcaacccacctggcacccaacctctgaggagctatccataggaaatgttcgttttaccacttttgaccttggaggtcacgaacaggccagaagagtatggaaagattactttcctgaagttgacgggattgtgtacttagttgatattgctgatccagaaagattcgaagagtctagagttgagttagatgctcttctgaagatcgaagagctgagtaaagttccagtgttggtactaggaaacaagattgacaaaagcacagctgtctctgaaaacgagctgagacatgccttgggacttatgactactactggtaaggacaaggttcagcttgttgagggtcaacgacctttggaagtcttcacatgttcaatttatctcaggcagggttacggtgagggtatcagatggctgtcccaatatatctaa

SEQ ID NO: 3565 - DNA, 654 bp, Artificial Sequence
  Optimized genes for Pichia pastoris
atgtctaagatcagcacgacccaggttagagaacacgttaaggagttgttaactttttccaacgagactaagaagagaaacttcttggagactgttgaattacaagtcggtttgaagaactacgacccgcagagggataagagattctcaggatcacttcgtttgcctcaagtcccaagacctaacatgaatttgtgcatttttggtgacgctttcgatgttgatagagccaaatctctaggcattgacgctatgtcagtcgacgacttgaaaaagcttaacaagaataagaaactgattaagaaactggcaaagaagtataactctttcattgcttccgatgtactcatcaaacaagttcctagactgctcggaccccagttgtcgaaggccggtaagtttccaaccccagtgtcccataatgatgatctttattctaaagtcaccgatgttaagtctacaatcaaatttcaactaaaaaaggtgctgtgtttggccgttgctgtcggaaatgttgagatggaagaagacgtcctggtgaaccaaatcatgatggctgttaacttcttggttagtcttttgaagaagaattggcaaaacgtaggttctttagtcattaaaagttctatgggtccatcctaccgtttgtactaa

SEQ ID NO: 3566 - DNA, 1281 bp, Artificial Sequence
  Optimized genes for Pichia pastoris
atgctggccagtggtaaaaggtttttcagttcgtcatctctaagacaggtttctgcatgggctaaggtagaaaaggctccagctgataagatcttgggcttgaccgttttgtacaaccaagacacaaatccttcaaagataaacttgggagttggagcgtacagagatgagaatggtaagccgtggatacttccaagtgtcaggaaagccgaagaggtcttaattaagacagaagttaacaaggagtatgttccaatcaccggatctccaaagtttaacgagttaatcaaacagaccctgtacggtaacgatcctgccggtaagcaacttttggaacaaaaccgtattgtctcttcccagtctatttccggcaccggtgccttgaaagttctttctgagttcattaagtactttcacgaaggtccaaaggacgtcttggtacctaaccctacttgggccaaccacatcgctatcctggagagatctggactgacgacttctaaatatcgttattatgatttcaacactaatcaattagataaaaaggggttacttgaggatttagagaacgctgccgaaggtcagcctgtcttgctccatgcatgttgccataaccctaccggagtggaccctactttggaagaatttgacgagatcattgatgttctttctagaaaaaagctgttgcccgttgtcgacatggcttaccagggttttcgttccggtaacccaattgatgacttgtcgctacttttcagattcaacaaggctgttgttgatggtagattggataattttgtgctgtctcaatccttcgcaaaaaatatgggtctgtacggtgagagagtgggctcattgtctttgatcacttctgacgctgacgaatcagttcgtgttaagtcccaattggaaaaagtcatcagaccaatttacagcagccccccatcgcacggttccaagttggttgagattgtcctatccgatgaagctatttatcaacaatggttgaaggacgtgaaggtaatgtccgatcgccttgttagtatgagaaagctcttatatgacactttaaagaacaaatacaataatccattggactggtcacatctgttgcaacagaagggtatgttctgttatacaggacttaacccagagcaagttgctaagttgatcgagcgatccgtgtacctcacctctgacggaagaatttcaattgcaggtatttacgaacaaaacgtcgattacctagccaatgctatccacgaagtcactactaattaa

SEQ ID NO: 3567 - DNA, 732 bp, Artificial Sequence
  Optimized genes for Pichia pastoris
atgagtttaccttctgctaccgctaatgctgccgtcaccaatcaattgctagaattgcctgacaccaaccttgtggccccagctgtgactgaggtttcagagaaagctgctcagtggccagccaacgttagactccagagacaaaagaaaattttgtatcaaagattaaaggttcctccagcaattgctcagttcactaacactcttgacagaaacacagctgcacagacatttaagttatttaataagtacagaccagagacgtacgagcaaaagcaagaacgattgactagagaagctgccgcaatcgcggatggaaagaagaaggaagacgtctcttccaagccttacgtagtcaaattcggattgaaccatgttgttgctctcatcgagaacaagaaaccgaaattggttctgatcgctcacgatgtcgatcccatcgaactagtagtcttccttccagctttgtgtcgtaagatgggcgtcccttatgccatagttaagggtaaggcacgtctgggtaccttgattcacagaagcactgccaccgttgccgccctggttgatgtgaaaccagaggacgaagctgagttggctcaacttgtttcggctattaataagaactttactgagaagtacgaagagtccaggaagaaatggggtggtggtattttgtctgctgaatcacaagccaaagctgcagccaaagcaaagattctggaggaaaagtaa

SEQ ID NO: 3568 - DNA, 1044 bp, Artificial Sequence
  Optimized genes for Pichia pastoris
atgtctgaagaggaacaacaacagacgaacgagaaggtcatagatttggaaaaaagaatgtttgtgggcaacattgactatgatacgacagaagaggagttacgagagttgatcaccggttttgatatcgagggtatcgaaatcccaaagagattttctaggcgtgtgggaaaactgactggccgtggattcgcttttgtaactttcgcctcatccgaggaaacagctaaggcaattaccgaatttgaaggaaaaaacctcaaaggtagagatatctactgtaagtccgctaagttgaaatctactgaggagaagacaaagaagaaaaaagctaacaagaagaaaacttcggccgctaagaataacgatggaacaactgaaggtgtcacaaatactgccgtcgacggtactgaagagtcacaggccgacgtttcctctaatgctgactctgcatctgacagcgtcgccgattcaaaggacaaggaaaacagtgcacccaacgggggaaagaagaaaaagccatactccaagaagaagcaaaatcctcacaaggttccacttgagcagggtactccttctgaaacctctattttcattcgtaatctacatcaagaagtagttactagtgaattgactgagttcctgtccgaatacgacccacagtgggtcagcattcctagacgtaacatccctaggcacgtggttcaaaagttgcgcaaggagaacattccaatcagatcgagaggtatggctttcgttagattcgcggaccatgaaacccaacaaagagcccttaaagagttgaacggtaaagagattaagggaaagccgatatctattgatatcgctattgactccttcgttaaggaagagccaaaggaatcctcagttaaggatggtgctgatgtctcaattgttaccgatggtgctcaaccacaagacgagggtgaggaaggtaaagttgaggaggaagttaaaagtgagccactgaagcctttagagtctactaccattgctcccgaagtccagactaccaccgtttaa

SEQ ID NO: 3569 - DNA, 1680 bp, Artificial Sequence
  Optimized genes for Pichia pastoris
atgcagctgcgtcattctgtgggacttgctatcctgtcagccatcgcggtgcaaggtttattgattccaaacattgaatctttaccatctcaatttggagcaaacggtgactccgagcaaggtgttcttgctcaccatggtaagcacccaaaagtcgacatggcacaccacggtaagcaccccaagatcgctaaggactctaagggtcatcctaaattgtgtcctgaggctttgaaaaagatgaaagaaggacacccatctgccccagtcattacaacccatagcgcttctaagaatttgatcccatactcctacatcattgtgtttaagaagggtgttacttctgaagatatcgactttcacagagacttgatttctaccctgcatgaggagtctgttagtaaacttagagaaagcgatcctaaccattctttttttgtttcgaacgagaacggtgagacaggttacaccggtgatttctccgtcggtgacctgctgaagggttacaccggttattttactgacgacactttggaattgatttcaaaacaccctgccgttgctttcattgagagagattctagagtctttgccacagatttcgaaactcaaaacggtgccccatggggcttggccagggttagccatagaaagcctttgtccttgggttcctttaataaatatttgtacgatggagctggaggtgaaggtgttacttcttacgtcatagatactggaatccatgttacacacaaggaattccaaggaagagcttcttggggcaaaacaatacccgctggagacgtagatgacgatgggaatggtcacggaactcattgcgccggtactatcgcttccgaatcctacggtgtcgctaagaaggcaaacgttgttgccatcaaggtgcttcgaagtaacggctcgggcagtatgtctgatgtcttaaagggagtggagtacgctactcagtcccacctggacgcagtcaagaagggtaataagaagttcaaaggttccaccgctaacatgagtttgggtggtggcaagtccccagccttggatctcgctgttaacgctgctgttaagaatggtattcatttcgctgttgctgcgggtaacgagaatcaggatgcttgtaatacttcaccggctgccgccgagaacgctattaccgttggtgcctccaccctttcagatgctcgtgcctatttctccaactacggaaagtgtgtggacattttcgctcctggcctcaacattttgtctacttacacgggaagcgatgatgccactgcaacgttatcggggacctcaatggcttctcctcatattgcaggtttgctaacatatttcctatctttgcaaccagcagctggtagtttgtattcaaatggtggttcagaaggagtcactccagcacagctgaagaagaacctgttaaagtatgctagtgtaggagttctagaggatgtcccagaagacactcctaatcttttagtttacaacggaggaggtcaaaatctctcatccttctggggaaaagagaccgaggacaatgtagcttcgtcagacgacaccggggaattccactcttttgtcaacaaacttgagtccgccgtagagaacctagcacaggaattcgcccactctgttaaagaacttgcctctgaattgatctaa

SEQ ID NO: 3570 - DNA, 825 bp, Artificial Sequence
  Optimized genes for Pichia pastoris
atgtcttctgagagcagaacttactccttcaagattttctcgatcctgacttacgccttgagtatatacggcgaagttaggtacttcctgttcagaacccatcactcccgtagctacttgacaccttttaccggaaactcaactcttgattatatttacgttatcgccaccctcctgttgcaactgttatttgtagtccagtacttctctcaagatggtactgtgagtgcaagagagcagaagaacgtcttggaacaagtgggatatcacttttctatttacaacgtcttaaatttcatctgggtgtatctttttaagcacaaaagattcctattcgctgaaatcgttctgtttgtcaacctgttcaacttactttcgttgtactttattcataaaacatatgctattaaggaccttggtagatggttcaccatccatctttccactgtcgccctacctctttcatggatacaatatgcaattttttggaatggagccgctttgtttcactcacattatgtttccttgttgcccagattgttagctaatttgctaatctgggagttcctgctagttccagctttctttattgttgtgtttgcagattacggggtaggtttctctagttcctacttaactctctctattgccgtcggtcaattgttgaccaaagttatcggacttcaatggattttcggttttgttatcgctggtacaattttcttactgtccttgttggtttctacgggtgttctcgctggtaaggttgctaacaacaacaatgtcttgggctctgaccgtgagcaggcgccattgttgacttaa

SEQ ID NO: 3571 - DNA, 249 bp, Artificial Sequence
  Optimized genes for Pichia pastoris
atggtccttgttcaggacttattgaaccctaatcccgtatcagaagcaaagcagcataagctaaaaacattggttcaagctccacgttccttctttatggatgtgaagtgcccaggttgtttcgagattaccaccgtctttagtcacgctcaaacagctgttacttgtgattcttgtactaccgttttgtgcactcctacgggtggtaaagccagactgtctgagggatgtgccttcagaagaaagtaa

SEQ ID NO: 3572 - DNA, 363 bp, Artificial Sequence
  Optimized genes for Pichia pastoris
atggctggtttgaacgctaaggagttgcgtgccaagtccgaacaggaacttgaagccgagttgattgagcagaaaaaaaagctggctcagttaaaggttcaaaagcttactaaggcatcagtgccagagatcaaggccgttagaaaagatatcgctcgtgtcttgacagtcattaacctgcaaaagagagacgctgtaagagagtcttacgccggaaaggagcacattccaaaacaactacgtgaaaagaaaactagagctttgagaagagctctcaccgcggaagagaaatctcatgaaaccgttcgacaacgcaatagaagagtcgccttccctaggagattatatgcagttaaggcttaa

SEQ ID NO: 3573 - DNA, 1059 bp, Artificial Sequence
  Optimized genes for Pichia pastoris
atggatattgatttagacatccagatgaaggacgcagttgaacccgacctcgaagatcagcaatcgagttcctcatcagagtcctttgacttccctataaacaacgttaactactcttccaaaccagtcgaattgacttctagtaatattaaccaattggactcttggatcgaacaattgactgattgcaaacctttatctgaggagagcgttaagaagttatgttccatggctatcgacgtgttgaagtttgaagaaaatgttcagccggtcaatgtaccagtgaccatctgcggagatgtccatggtcaatttcacgatcttatggaattgtttaaaattggtggtccctgtcctgatactaattatctgtttatgggtgactatgtggatagaggctactatagtgtagaaaccgtttcctaccttgttgctatgaagatcagataccctaaaagaattaccatactgagaggtaatcacgagtctagacaaatcacccaggtctatggattctacgacgagtgttttcgtaagtatggttcggctactgtctggaagttgttcaccgacctgttcgattacttcccaattactgctctggttgacaacaagattttctgtcttcatggtggattgtctcctatgattgagacaattgatcaagtgagagagttgaagagagtccaagaagttccacatgagggtccaatgtgtgacttgttatggtctgatccagatgaccgcggaggttggggtatctctccacgtggtgctggttttacttttggccaggacatcagcgaacaattcaaccacactaacgacctggatttgattgcaagagcccaccagctagttatggagggatactcctggtcacatcaagatctagtcgttaccattttctcagctcctaactactgttatcgttgcggaaaccaagccgccattatggaagttgatgagaggcacaaccgtgagttccttcaatacgatccttctatcaggccaggggagccaacggtaacaagaaaaacaccagactacttcttgtaa

SEQ ID NO: 3574 - DNA, 255 bp, Artificial Sequence
  Optimized genes for Pichia pastoris
atgttccagagaaccacagctaccctggttagacaaaataaagccatcgctcgtttctattctgagggttcaactggagctccaaggtctgatggttccggtgacgcctttactaagagagagaaagcacaggaagatttttacatcaagaagcaccaggctgaacaattggctaagttaagagaacaattgaaaaaccaaaaggagcatcttcaaaacttggaaaaggagattaacaatattaaggagaaataa

SEQ ID NO: 3575 - DNA, 1062 bp, Artificial Sequence
  Optimized genes for Pichia pastoris
atgtccacctttgactttttgtccagaaagtcaggagttattgtcggtgacgatgtgagaaagctttttgagtatgcgagagagaggaagtttgctattcccagtatcaacgttacttcgtctagtactgctgtcgcagtgttggaagccgcaagagacaacaagtctccaggtaaaggcgtaaacaacaaggatttgtccgccagcgtcactggttccattgccgccgctttattgattcgtactatcgctccatcttacggaattccagttatcttacatactgaccactgtcaaaaaaagtggttgccttggttcgacggcatgttagatgctgatgaggagtacttcaaaacccacggtgagccactgttctctagtcatatgcttgacctctctgaagagaccgatgatgaaaacatagccatctgcgttaaatacttcaagagaatgactaagatgaatcaatggctggaaatggagatcggaattaccggaggtgaggaggatggagtgaacaatgaaaacgctgataaggattcattgtacacatcacccgagaccgtgttcgctgttcacaaggcattggctcctatatcccctaattttgccattgctgctgctttcggcaatgttcatggtgtttacaaaccaggtaacgttgaacttcgtccatccatcctaggtgaacatcaagcttacgccgctcagcaactggggctcaagaacggaagcaagcctttgttcttggtctttcacggaggttcaggttcctctcaacaggaattcaatacagctatcaatcatggagtagtcaaagttaatttggacactgactgtcagtacgcctatacaattggttctcgtgattatattttgaagaacaaagactatctgcagtcaatggtcggtaaccctcaaggtgcagataaaccgaacaagaagtacttcgacccaagagtttggatccgagaatctgaaaagaccatgtcgggtagagtaaaggaagctcttgaggtcttccacgcagccggtacgtttaagtctgagtctaaactataa

SEQ ID NO: 3576 - DNA, 777 bp, Artificial Sequence
  Optimized genes for Pichia pastoris
atgtctacgcaccaagatattgaaagctctgcagaaactgctcacaacccacatgacgagatccacaaaggtgagttcgtcaccacccaacaggactacctagccccatttactggtggtctcatttctggttatcaagttagaccttctagaaagttcgcaaacccagttcctgctggagtattctccttgggaactagtttgtttactttgggactgatccttgccggaactagaaacgtctcgtccccagccgtattgaccggatcctttttgttttcgtcaggactgattcaaatcatctgtggcatctggtctattgtgttagaaaacgtctttggttctgttctgttgttatgttacggtggattcttcgcgtcattcggtgccatccaaaatggcatgggggtcgacgcttacactgatgccgatgagttgacaaatgctttgggtctgtatgttgctgcttggaccgtgtttgccattgttctatggaccgcaactttcaagtctacattgcctttattcttgttgaccttttttacagccatgttcttcctcctgtatgatattgccatttttggtaaccatactggttgtgagactgctagtggtgttttctgctttcttgctgcaatgtgtgctttctacgctggttacgtgggtatgaccaagaatcagagaaactcatacatacccgttccgaaaacaaagtggcttcttatgccatcctctgctcgttcccctgactacaatcaggctggtttctatgtctaa

SEQ ID NO: 3577 - DNA, 534 bp, Artificial Sequence
  Optimized genes for Pichia pastoris
atgggaagaagaaagtcacaggccgctgcagagagaaacttggaaccaattaagatttcgactgattctattaagaagagaccaagaagggattccaacgagccacctttcaaaaagtttgatgacctcgagatgttcgaaacctacctgaaaggagagagttgggacaatgacttcgacttcttgcatgctcgtttagattattacccgccatttatcagaaacgagattcatgacgaccctgaaaagattaaacccaccatgaacaacaaatccaagaaattcgttcgtaatctacaccaccacgtcgataagcatcttttgaagcaaattaatgacatggtgggtatcgagtataaatttaagagagaggaggaaaagcttccagacggccgtttgatctggagatacaaggatgaatctgaccacggttttgaaggtctggaccgaaagtggacagtagaagttgatgtcgaatgttctccaaacgatcctactgttgtcgttgatatgagaagcatccctatagattaa

SEQ ID NO: 3578 - DNA, 837 bp, Artificial Sequence
  Optimized genes for Pichia pastoris
atgactgacagagcaacacaaaactctatcaatactaaccaaaactcaaactcttctttcaaccaagatgttgaaaagggcgatgttgaagctcagggcgctccggcccagcccaccttcaccaacagtacttttagacacgacgaccaaaacatttatattaatgataccgctatcccaaaggaggagtttatgtacgctttcggaggaactctgacgactggtagacagtccgtccatcgttcgtttggtaatcctgttcctgccggtttagccggtttttccttgggtacctttgctttggggcttatcttgttacaagctagaggagtcactgacgtttccatattgattggcatgttcttgtttgtgtctggagtagtggaaattattgcaggtatttggtgtatcgtggtagaaaacacctgggcttctgtcgttttcctgggatacggaagtttctggcttggttatgctgccattgtcactccagcattcggtgttgctgcagcctacgagacagcagaggatttcaataatgccgttggtatgtacttgtgcccttgggctgttttcagcttcatcctgtggtcttgtacatggaaatctacatggccactaactgctctcgtgttctgtatttttatgatctttttggttcttactatcggttatttcgtttcttccgttcctaccattaaagcgggtggagtcttttgtttcgtcggttccttgctgggtttttataatatgtacgctggtttagccaaccctaccaactcatacgtagtcgtccacccactatttatgccaaacgccgctaagccagcttcataa

SEQ ID NO: 3579 - DNA, 1197 bp, Artificial Sequence
  Optimized genes for Pichia pastoris
atgtctgttagaaacgcaacctttagattaagcagagcagctatcgctaaaagaactttggtgcgaatcgcatcccaggcttccctgcgtccaacaacgttgaattcggctactggagtagctcgttcccaactaactttcagtagaggtgtcaagactatcaactttggcggtgttgaggaagtcgtccacgaacgtagtgactggcctagagagaagctgttggaatactttaagaatgatactttggctcttatcggatacggttctcagggttacggtcaaggtttgaaccttcgcgataacggtttaaatgtaattattggagtccgtaagaacggagccagttggaaagccgctatcgaagatggatgggtgccaggagaaaacttatttgacgtcaccgaagctattaagaagggttccataatcatgaacctcttgtcagatgccgcgcagtcggaaacctggtcaactgtcaagccactgcttactgagggaaagactttgtatttttcacacggattttctcctgttttctctaatttgactcatgttgaaccaccctccaacattgatgtaattcttgctgcccctaaagggtctggtagaacagttagatctttgttcaaggagggaagaggtattaactcctcatatgctgtgtggaacgatgttactggtaaggcagaggaaaaagccattgctctagcagttgccgttggttcaggatacgtttaccaaaccacctttgaaagagaggtcaattctgacttgtacggtgagcgtgggtgtctgatgggtggtatccacggtatgttcttggcccaatacgaggttttgagggagaatggccatacaccaagcgaagctttcaacgaaaccgtggaggaggctacccagtctctgtatccccttgtcggtaaatacggtatggactacatgtatgatgcttgctctacaacggccagaagaggcgctctcgactggtatccgattttcaaagatgcccttaagccagtcttcgaggacctatataattccgttaaaaccggcaaagaaactcaaagatctttggacttcaactctcaacctgactaccgtgaaaagttagagaaggaactggagataattagaaacatggagatttggaaggttggtaaggaagttaggaagttaagacctgagaacaattaa

SEQ ID NO: 3580 - DNA, 681 bp, Artificial Sequence
  Optimized genes for Pichia pastoris
atgtccattccaaaaccagagggctctacattgagactgggatctactgcccctgatttcaaggctgagacttcgagaggtccaatctcttttcacgacttcattggtgattcttgggtagtccttttctctcaccctgacgatttcactcccgtttgtaccacggaacttggagcattcgctaagctccagccagaatttgagaagcgtggtgtaaaattgattggtttgtctgccaacaccacagatagtcaccaggcttggattaaggacattgatgaagtcaccggtagccatctgacctttccaatcatcgccgacccagagcgtaagattgctttggcttacgacatgatcgattttcaagacgcttctaacgttgacgataagggggtgcaattcactattagatccgtttttatcattgacccaaagaaaaaagtccgtttgatcttatcatatcctgcatcaactggaagaaataccgctgaagtgctaagagttattgactccttacaaactggtgataggaacagagtcaccacaccaattaactgggttccaggtgatgatgttatcgttcatccctccgtgactaatgaggaagccaagagtttgtttccgcaattccgagtcataaaaccttacctgagattgactcctcttgacccttcaaagtaa

SEQ ID NO: 3581 - DNA, 678 bp, Artificial Sequence
  Optimized genes for Pichia pastoris
atgggggacacccttaaagagcccatcatttttgcaccaaagacttatcaatacgacaaattccaacttaacccagaagatatggccgaagatccaatcgaacaattcacaaagtggtttcaagaggcacaagaggccagagaggatcttccagaagccgttaatttagcgactgctagactgccgtctggacgtgtatcgtcccgtgtggttttgtttaaggaactcgatgatagaggattcgttatatacagtaattgggagcagagtaagaaaggacaggatgtcaagtccaacaagtacgctgctattaccttcttctggaagggtctgcaacgacaagtcagagttgaaggtgtattcgaagctgtttccagatctactgtccaacgttactttgacactagaccaaggggttctcgtttgggtgcctgggcttcacctcagtctgtggagatcccatctagagcagccttggaatcaaacctagaagctattgagtcccaattcagggacagcgtttctgtccctgtccctgaccactggggtggccagcgtttagttcctctggagattgaattttggcagggtagaccatctcgcttgcatgacagattggtgtatagaagagagaacttggaggataataaatggtcaatcgttagaattgctccctaa

SEQ ID NO: 3582 - DNA, 1410 bp, Artificial Sequence
  Optimized genes for Pichia pastoris
atgtctgccatcagatctatcgctcagaggactcttcgtactcaggctcaaatttcaagagtttctttcttgggtgctagagcctactccaccaaggaaccaaccctgaaagagagattcgcagagttgttgccagagaagatcgagcaaattaagcaactgaaggctgaacatggtaagactgttattggtgaagtccttctggaacaagcttacggcggcatgagaggtataaaaggtcttgtttgggaaggatctgttctggatccaattgaaggaataagatttcgtggacgtaccatcccagacatccaaaaagagttgccaaaggcaccaggtggtaatgagccgctgcctgaggctctattctggttgttattgactggtgaagtacctaccgaatctcagactaaggctttttctgaggagttggctgcacgatcagcgttgccaaagcatgttgaagaacttatcgatagatcaccagccaccttacaccccatggctcaattcagcattgctgtgactgctttagagtcagaatctcaattcgctaaggcatatgccaagggtgtcaataaaaaagaatactgggtgtatacgtatgaagattccattgacttgattgctaagttaccaaatattgcagctaggatctataaaaacgtctttaaggatggtaaagtgggttccgttgacccttcaaaagactatagcgcaaacctagccagtctacttggatttggtgagaacgctgaattcgttgagctcatgagattgtatttgtctatccactccgaccatgagggaggtaacgtgtccgcccacactacacatctggtcggttctgccctgtcttcgcctttcttgtcttttgccgccggattgaacgggttagctggtcccttgcacggaagagctaaccaagaagttttggaatggttgtttcagattaagaaagaactcggcggggatttctccaaggaaaagattgagaagtacctttgggacacattaaaggctggaagagttgtcccaggatacggacatgctgttttgcgcaagactgaccctagatacactgcccagagagagttcgcattgaagcacttgccagacttcgatctttttaagctcgtatccgctgtctacgaggtcgctccagtcgttttgaccgagcacggtaagacaaaaaacccctggcctaatgtcgattcccacagtggtgttcttttgcagtactacggtcttacagaggaaagtttttacaccgtcctgtttggtgtttctcgtgccctgggtgtgttacctcaactaatcattgatcgtggcgttggtgcccctattgaaagacctaagtctttctcgactgagaagtacatcgagttggtaaaaggattgggtaagtaa

SEQ ID NO: 3583 - DNA, 1020 bp, Artificial Sequence
  Optimized genes for Pichia pastoris
atgtccaccaggcctcaagtaacagtaatttccgttgaaggtaaaccatcttccacttcattgccattgccagctgtctttaaagcacccatcagaggagatatcgttcaatctgttttcaccagaattaataagaataaaaggcaggcctacgctgtgtctgagaaggcaggacaccaaacttctgctgaatcttggggcacaggtagagctgttgccagaattccaagagttggtggtggtggtactcaccgttctggacaaggtgctttcggaaatatgtgccgtggcggtagaatgttcgccccaaccaagatttggcgtaaatggcatgtcagagtcaacctaaacgagaagaggtacgcaactgcttcagccattgctgctacatcagtccaatctctcgtgttggctagaggtcatcgtatagagcaaatagccgagatccctcttgttgtttcgaacgacttggaggctattcagaagaccaaagacgctatcgccgctctgaaggctttgggtgcttcagatgatcttattcgcgttatcaagtcgaagaagttaagagcaggtaagggcaagtaccgaaaccgtagatttactcagagaagaggtcctttgatcgtgtttaacgaggacaaaggtttggtaaaagcactcagaaacattccaggagtggaaacctgtaacgttcgtactttggggctgcttcagttagctccaggtgctcatctgggaagattcgtcatttggaccgaaagcgcatttgccgccttagatagtgtctacggttctgaaacaactgaatccgtcaagtccaattattccctaccaaaaaacattattactaacactgacatcagtagcgttatcaactctgcggaagtccaagccgccatcagacctagtttggctggaaagccgacccacttacacgttaaaaaggtcaaccctttgaagaatcatgaggttatgcttaagttgaatccctatgccaaggttctggctgagaagaagtaa

SEQ ID NO: 3584 - DNA, 1743 bp, Artificial Sequence
  Optimized genes for Pichia pastoris
atggctttcggtgataaacttacccacagattccacaaaagttctgacgcttctaccggcgctgccagcgtagaggagtattctacttccattcacgaaaagtctgataagtcagcaatcggaaagtttttggacaaaatagccgtgcaagaagagaagggtctttctgtttctcaaacttttcttttcaatttcgatttgagacctgtagagtctgctaggagagtctggtcctggtttaactacgtttttttttggatcgctgactcctttaacattaacacatggcagatcgccgcaaccggtgtgcaggcgggtatgtcttggtggacatgttggcttagtgtttgggtaggttactttctttgcggaatattcgttaccatatctgctcgtgttggaatctactatcacgtttcctttccagttagctgtcgtagctcattcggtgtctttggatcgatttggcctgttttcaatagggtggttatgtcatgtgtttggtatggtgttcaaggttacatcggtggaacaactatggccctgatgctgagatccatttttggcaatgatttgaacacgcgaatccctgatggtatatcttcgcctaatgtcaccaccttcgaattcttgtcatttttcctattttggttgttctccttgcctttcatttggttggagccccataaggtgagacacctcttcactgttaagagttatgtggtccccgctaacggaatcggtccaatcgttaaacagccgtcaactatccatggttctgagttcgcttgggaatttattagaatggttatgaacagtttggctaactttgcaactttgattactaacgcaccagacttttcgagattctccaagacgaagaagtcagccaaatgggctcaattattttctattccattgtgcttctccatcacttccttaattggtattctggtctcctccgcttctaccgtcatttacggtgagacatactggtcccctatcgatgttttgggtcgtttcttagacaactacaactctggtaatcgtgctggtgtattcttcatcagtttggcattcgcactagcccaactcggtactaatatttcagccaattctttaagcgcaggtactgatgctaccgccctttttccaaaatacattaccattagacgcggaggatatatttgtgctgccgttggtcttgctatctgcccatgggagctgttgtcttcttctaacaagttcaccacttacttgtcagcctactcggtattcttgtctgctattttcggagtcatcttcgctgactactatattgttaagagaggttggttgattctgactgacttatataacgccgaaaagacctcagcttatacatactggcatggcattaattacagagcctttgtggcctatatttgtggtatcctcccaaacattgtcggattcgtcggagctactggtgctggtagtgtgcctcagggagctatgtatgtctatgattttaacttctttactggttttgcctcctccattgtcgtttacgtcttactgtgttacatccatccaatcccagggctgccaacagacattaaaaaggatttgttcaagaaggggtggtacgaaatttacgctgaggttgaagagttcgatgtctctggcggcgtcatcaacggagaaggtcaagagccagaagaagaagctatcgactactactcagaggaaaagaaagtttaa

SEQ ID NO: 3585 - DNA, 2712 bp, Artificial Sequence
  Optimized genes for Pichia pastoris
atggaagagacccaatttacagacagagctcttgccattattactaacgccactaaacttgctaaggataactctcacccgcaggtgcagcctatccacttgttagctgccatggccccaaccgacgaagatacaaccccctacttgaaggttttagtcgaaaagggtagattcgattggcagacttttgaaaggaacatcaaccgtgccctgattcgtgtcccatcccaaaccccagctcctaccgacgtttctttctcaggtgtggctgctcacgttatccaggaagccggtaaaatgagacaacagcaaaaagactcatatattggtcaagatcacttgctgttagccttattggaggacaaatcgatcacccagattttgaaggactcctccatttctccagacgccctcaaaactcagatcattaacttgagaggtaaccaacgtatcgactctagacaggctgactcctccagcaaccatgaattcctcgataagtacgccattgacttgaccgaacaagctagagaaggaaagattgaccctgttataggcagagaggaggaaatcagaagaacaatcagggttcttgccagaagaactaagtctaatccttgcttaatcggtgatccaggcgttggtaagactagtattgttgaagctgtcgctcaaaggatcatagataacgatgtacccaatatcctacaaaactctaagctgtacgctctagatttgggagccttgaaggcaggagctaagtaccaaggagaatttgaggagaggatcaagggtgttttgaacgagattgccgagtccaagcaaatgatcatcctgttcatagatgaaatccacatgttgatgggtgatggtaagtctgatgcagctaacctcttgaaacctatgttagctagaggatctctgcactgtattggtgctactactgtcatagagtataggaagtacgttgagaccgatggagcatttgaaagacgcttccagagaattgacgtcagagagccaacaattagagagaccgtggccattctaagaggtttacaacctaagtatgaaatccaccatggtgtcagaattctggactccgctctggtcactgcagctcaattggctagcagatacttgacataccgtaagcttccagacagtgctgttgatttgattgacgaatcttctgcatctgtggctgtggcaagagactccaagccagaggaactggacacaaaagaaagagagttgcagttgttggaagttgagatgaaagctctagagcgtgacgcggactctgataagacaactgaagaaagacttactgctgttaaacagaaggtgcaggaacttgaagaggaattggttccacttagagctaaatacgaacaagagcgtgcagggcatgaagaactaaccgctgctaaaaagaagcttgatgagcttgagattaaggctactgacgctgagagaagacatgataacgcaacagcagctgatttgcgatactttgcgattcctgacgttaagcgtagaattgccgagttagaggaaaaggtcgccgaggaagaggcagctttgtctgatattgccatgattactaacgtcgttggttctgagcaagtcgcggaaaccgctgcccgtcttaccggcattccagtccaaaagttgacccaagccgagaataataaactcatcaccatggaaagagagttatcctcttctgttgtgggtcagtccgaagctgtgaaagccgtttctaacgctattcgtctatccagatctggcctggcaaacccaaatcaaccagcttcgttccttttcttaggtttgagtggaagtggtaagactgaactggccaagaaggttgccggttttctgttcaacgacgagaaagccatgattcggatcgattgctcagaattgggtgagaagtggtcatatactaagctcttaggttctgagccaggattgattggcagcgatcaaggaggactcctaacgaaccagctgttgagacacccttactccgtaatccttttcgatgaggttgaaaaggccgcaccggaggtcttgaatattttgcttcaaatgttagacgatggtcgcataactgcttcaaatggaactttggttaactgtagtaattgtattgtaattatgacttcaaacttgggtgctcaatttattaactccgctaaagggtcgaaaatctcacctgagactaaggagttggttatgaccgccgttagagctcattttcgtccagagttcctgaacaggatctcagccacggtcgtctttaaccgtttatcgcgtcatgctatcagcaaaatcgtcaaaattagattggctgaaattgagcaacgattcgaggctaacgcaaaatctattaagttggacgtggacgatgccgctatcgaatacttgtgtcgaaacggatattcatcagatatgggtgctcgtccactgaatagacttattcaaaatgaaatcttgaatcaattggctgtactgattctgaagggtcaagtcaaggataaggagacggttaagatcagactaggtagtaagggacttgatgttttgcctaatcacgccgtcgagtctgattccatggatgtagatgttgatgattgggtagacgctgctgaggaagaagactccgacaataatcatgacgaccaggcacccttgtatgactaa

SEQ ID NO: 3586 - DNA, 2343 bp, Artificial Sequence
  Optimized genes for Pichia pastoris
atgcttagtgctagaagggttttagcaaagatcaactcaagagggctggctaccgtgtctggtttgacaaaggattctttggttgagatgaacttgctggaaaagggtaactatataaactataaacagcagcttgataacgttaacatcgttaaggaacgtttaggtagacctcttacctacgctgaaaaattgttgtacggacatttggacaaacctcacgaacaggatattgagagaggtgtctcgtacttgaagcttagaccggatcgtatcgcttgtcaagatgctaccgctcaaatggctattttgcaattcatgtctgcaggtatgccctccgtggccactcctaccactgtacattgtgaccatctaattcaagctcaaaagggaggtgctgccgatttggaacgtgcaattcggcttaacaaagaagtctacgattttcttgccactgcttgtgctaagtataatattggattttggaagccaggatcaggaattattcaccagattgtgttagagaactacgctttccctggtgagttgctgattggaacagattctcacactcctaatgctggcggtcttggtcaactggccattggtgtcggaggcgccgatgcagtggacgtcatggctggtttaccatgggaattgaaagctcccaagatcatcggtgttaagttaaccggaagaatgaacggatggacttcaccaaaggacatcattttgaagctcgccggaatcactaccgtgaaagggggaacgggtgccattgttgaatatttcggtgacggagtggatactttctcttgtactggaatggctaccatctgtaacatgggagctgagattggtgcaactacctccgtctttccatttaataattccatggttgatttcctagacgccacgggtagaagtgaaattggcgagttcgcaaaggttttccagaaggagtacctgagcgctgaccctggctgcgagtacgaccaggttattgagatcgatttaaataccctggagccacatattaacggtcctttcacacccgacttagcaactccagtatccaaaatgaaagaagtagcagtcgctaacgattggcctctcgaagttaaagtcggattgataggttcttgtaccaactcttcttatgaggacatgactagggctgctagtataatcgaagatgccgctagtcacggagtaaaggccaaatccctatataccgtcactccaggttctgagcaaatcagagctactatcgccagagacggacagctcaaaacatttaccgattttggtggatctgttctggcgaatgcttgcggtccatgcatcggtcaatgggacagacaggacatcaagaagggtgataagaacactatagtttcaagttttaacagaaacttcacttcacgcaacgacggtaatccagcgactcatgcctttgttgcctctcccgagatggttactgcttacgcaattgctggtgatttacgatttaaccctcttacagacaaattgaaggacaaggacggtaatgagttcctgctcaaagatcccgtcggagtgggcttgccagtcagaggttatgatccaggtgagaatacctatcaagccccaccagaagaccgtgcctcagttgaagttgtcattagcccttcgtccgatcgtttgcaaagattgacacctttccagccatgggacggtaaggatgccgagcgtttgccaattttgattaaatccgttggtaagactaccactgaccacatttccatggctggtccttggctaaagtacagaggacaccttcaaaatatttctaacaactacatgatcggggctatcaacgctgagaatggtgaagcaaacaatgttaagaaccactacaccggtgtctactctggtgtccctgacaccgccgccgcatacagggacaacggcgtcaagtgggttgtgattggtggtgagaacttcggtgagggttcctcaagagaacatgctgctctggaaccaagatatctgggcgggtttgcaatcatcactaagtcctttgccagaatccacgagacaaatctgaaaaagcaaggattattgccgttgaatttcacagacccagctgcttacgatcgaattcaacctgatgatgaggttgatatcttgggtttgaccgaattggcccctggtaagaacgttactcttagagttcatccagctgacggttctccaacgtgggaaactccattgtcgcacacatacaatgctgaacaaattgagtggttcaagtacggctctgccctaaacaatatggccgctgtaaaggctagcaagtaa

SEQ ID NO: 3587 - DNA, 732 bp, Artificial Sequence
  Optimized genes for Pichia pastoris
atgcccgaagtgctgatttcgaagaaacgtaagctggtagccgacggagtgttttatgcagaattaaacgaatacttcactagagagttggctgaagacggatattccggcgttgaggttagagtaacaccgacgaccactgaaattattatcagagcaacccaaacaaactcagtcttgggtgagaatggcagaagaattcgtgagttgaccgctttggttcaaaagcgtttcaagattgatgagggtaaagtcatcttgtatgctgaaagggttcaagatagaggtcttagcgccgttacccagtgtgaatctttaagatacaaattgttgaacggactcgccattagacgtgccgcttacggtgttgtcagattcgtcatggacagtggtgctaagggggttgaagtcgtggtgtctggtaagctgagagctgctcgagcaaagtccatgaaatttgctgatggttttatgatccactctggacagccagctaaggactttatcgagactgctactagacatgttttgcttaggcagggagtccttggtatcaaggttaagataatgagagatccagccgctgcacgcactggtcctaaagctctacctgacttcgttaaaattcacgaacctaaggatgagcgtgaagttccagccccattcgtaaagtcatacgtcgctgagccagttgtcgaagcggaggaggctgaggagcaagccactgcctaa

SEQ ID NO: 3588 - DNA, 486 bp, Artificial Sequence
  Optimized genes for Pichia pastoris
atgcccattgatcaacagaagttagaaaagttgcaaaagtctggtccaagaagagtgggtggagccaggctgaagcagaaaagatcaaatcgtgacgccgaggcagacgacaccaaactccaggcaactcttcaaaagttcaacgttcaaactctgaccggtgtcgaggaagccaattttttcaaggatgacggcaaggttttacacttcaacagagttggtgtacaagcggccgctaactacaacacttatgctttcacggggtacgctcaagagaaaaacataacagatcttattcctggaattctgccacaattgggagctgagaatttgcaatttttgcagcaaattgctgaatccctacaaaagaacccagacgccttgaatgctcttaagaatcagaaccaggaaggtgctgaagctgaagacgattctgagatccctgagttggtcgagggtgaaacctttgataaaaacatcgattaa

SEQ ID NO: 3589 - DNA, 1542 bp, Artificial Sequence
  Optimized genes for Pichia pastoris
atgactgtggtcgagcctgtaggtgacgtcttcaacactatacttgtcttggatttcgagttcaatgtctatgctgagatgttgccttgtactcaaaaaatctccgaattaccctttacccctaccggagtgattttctccggtggtccgttttcagtctatgaagaagggtctcctcatgtagataaggaaatttttaaccttaatgttcctatcttgggtatctgttacggaatgcaagagttagcatggatcgataatgtcgaaaacgtggctcgtggagaaaagagagagtacggtccagctacattgaacgtccaggacaaggattgtgccttgttcaaggatgttgaccattctcaggtttggatgtctcaccacgataaacttcataacttaccttccggcttcaagaccgtggccactactgaaaactcacaatttgccggagttgccaacgaggccaagaagatctacggtatacaattccacccagaggttacgcattctgttcagggaaagactattttgaagaacttcgctgttaatgtttgcggtgctactcaaaactggacaatggaaaactttattgacactgaaattaacagaatccgcactctggttggtcccaccgccgaggttattggtgcagtctctggtggagttgattctacagttgctgctaaattgatgaaagaagctatcggcgatagattccatgccatctacgttgacaatggtgtcatgcgtaagaatgaaaccataacagtaaagaaaaccttggatgatggcctgggaattaacttgaccgtggtcgacgctggtgagcaatttctttctcaattaaagggtgtcactgacccagagaagaaaagaaagattattggtaacacctttattcacgtctttgaaaaagttgcagctgacatcaagccaaaggatggtagcgagattgaatttctcttgcaaggaactttgtatcccgatgtgattgaatccatttcgttcaaaggtcctagtcagaccattaagactcaccacaatgttggtggtcttactgagaacatgaagctaaagttgatcgagccactgagagaattgtttaaagatgaggtccgtcacctggggcaactgttagacatcccagaggatctagtctggcgacatccattcccaggcccaggtattgcaatcagagtactgggtgaggtgaccccagagcaagttaaaatcgccagagaagctgactacattttcattgaggaaatcaagaaagctggtctctaccgtaaaattagtcaagcgttcgccgcattgcttccagtcaagtcagtcggagttatgggagaccagaggacctatgaacaggtaatcgctctaagggccattgagacatcggactttatgactgctgactggttcgttttcgaagccgcttttttgaagaaggttgcttccagaatcgttaatgaggtggacggagttgctagagttacttacgatattacgtctaagcctccagcaacagttgaatgggagtaa

SEQ ID NO: 3590 - DNA, 1437 bp, Artificial Sequence
  Optimized genes for Pichia pastoris
atgagttcattccgtgttctagacttggttaagccatttactcctttcctacctgaggtgatcagcccagaaagaaaggttccttttcaacagaaactgatgtggacaggtgtcaccttgcttatcttcctggtaatgtctgagatcccgctttatggtattacatcgtctgattcctctgatccactgttctggttgcgcatgatgcttgcctctaacagaggtaccttgatggagttgggtatttccccaattgttacatccggaatggtttttcaactattacagggtatccaaatcctcgacgtaaatatggaaaacaaagctgaccgtgagctttttcaaactgcacagaaggttttcgccatactgttgtcaattggacaagctactgtttacgtcttgactggtatgtacggtccaccaggagaacttggagtcggtgtctgtttgctcttggtattgcaattagtcttcgctggtatcgtagtcatcctgctagacgagctgcttcaaaagggttacggtttgggatcaggaatcagtctgtttatggcaacgaatatttgcgaacagattttttggaagacctttgccccaactactgtgaaccgtggtagaggtaaagaatttgaaggtgctttcatttctttcttccaccttatccttaccaagaaggataagaagagagccctcctcgaatccttctacagagataatgctccaaacatgttccaagttattgctactttggtcgttttcttcacagtcgtttatttacaaggcttcagattggaaattcctgtgaaatcgactagacagagaggaccatacggcacctaccccattaggttgttctacacttcgaacatgcccatcatgctgcaatccgctttgaccagcaatatcttcattatatcccagatgttatattctcactttcccgacaacgcctttgttaaattgattggaacctgggaggctcagccaggttctgctcaactttttgcagcctctggacttgcatattacatgcaaccacctatgtctttgtcccaagcactgttggaccctattaagaccgttgtttatgtcgtctttgttttaactacctgtgctatttttagtaagacatggatcgagatctccggttcaagtcctcgagatgttgccaaacagttcaaggatcaaggcctggtgattgctggtcatagagatgctaccgtctacaaggagctaaaaaagattattccaacggccgctgctttcgggggggcgacaattggtgctttgtctgtggtttcagacttattgggtactttaggttctggaacttcaatcttgttggctgttactactatatacggctactatgaattggccgtcaaggagggtggtttttctaagggaggaccttctggtttcgtggatttataa

SEQ ID NO: 3591 - DNA, 1047 bp, Artificial Sequence
  Optimized genes for Pichia pastoris
atgcaggttaagtcaatagttaatcttcttttggcttgttcgttggctgtcgccagacctctagaacacgcccatcaccaacacgacaagagaggtgtcgtggttgtgactaagacgattgtcgttgacggtagcacagtcgaagcaactgctgcagcccaggtacaagagcacgccgaaacttttgctgagtctacaccatctgctgttgtttctagctcctccgcaccaagttctgcatcctcggcttccgcacctgcatcttcaggtagtttttctgctgggactaagggagtcacttactccccgtaccaagcgggaggaggctgtaagactgccgaggaggttgcttccgacctcagtcaattgaccggttacgaaatcatcagattgtacggtgttgattgcaatcaggttgagaacgttttcaaggccaaggccccaggtcagaaattgttcttgggtattttttttgtcgacgctatcgaatctggagtctcagctatcgcttcagctgtgaaatcatatggttcatgggacgatgtccataccgtgtccgttggaaacgagctggtgaacaacggagaggctactgtttcccaaatcggtcaatatgtttcgaccgcaaaatctgctttacgttctgctggcttcaccgggcctgtccttagtgttgatacatttattgccgtaatcaataacccaggtctgtgcgatttcgctgatgaatacgtagccgtcaatgctcatgccttctttgacggtggaattgctgcttctggtgcgggagattgggccgccgaacagattcagagagttagttctgcctgtggtggtaaggatgtgttgattgttgaaagcggatggccatctaagggtgataccaacggcgctgctgtaccttctaagtctaaccaacaagctgccgtccaatcactgggacaaaaaattggttcctcctgtattgctttcaacgcattcaatgactattggaaagccgacggtcccttcaacgctgagaagtactggggtattttagattcttaa

SEQ ID NO: 3592 - DNA, 1074 bp, Artificial Sequence
  Optimized genes for Pichia pastoris
atgagcaaggctagtcctgagaccacacatcttttgcaccacgacccctacgacaagacagaaagatccgccgctcaaaagtcttcttggaaaaacactttgtatattatcttcgctaccgtcgtgtcggtcccactgttatacctcttcttggtttacctaccaaacttagctcctgaatctgtttctgaactgcctattatcagaaaagtggataaactagactttagtaaccaattggaagttccacgtcgattgattcttatcggagacgttcatggatcactgaaacctttgaagaagttattgagaaaattggactacaatccaaagggttcaactgatactgttttgcttttgggtgactttatctccaagggtcctcaatcggtcgaggtcgtagacttagccattaaaaacaaatttcaatgcatccttgggaatcacgaaatctccgtcttgcaaagatataaccagttccatggtctgtccggcctgaagtatcgtaataacgagtctgacatcgagaattatgaccttcagtccggacaattgtatcccttggatgatgaaatgagattggctaagcagctctacccgagacatatagagtacatgggtacttgtcctttcatttacgatcttggaccagttccacgctacaataggaagcacaccaactacaaagagacagtggatggtgtcgccgttcacgctggtctaaactggaacgtccatgagttgtatgatcaagatgtaaccgaagtcactgagatgagggctatgttgccaccagacttctcaaaggcaactgacgataagagcattccaggttctgttggttgggctaagatctggaaccattggcagaacaatattaccgactctgatgactttgatggtctgaagaacagaaaggtttactatggtcaccacgcatcccgtggtctgaatgttagaccttacaccatgggcatagatactgcctgtgttaagggagatagactcactgccgttgtgattacgtaccacaagggaaaaattcgtgaaaagttagtatcagttggttgttaa

SEQ ID NO: 3593 - DNA, 1149 bp, Artificial Sequence
  Optimized genes for Pichia pastoris
atgtgtttgcaatcaattgtcatcgatttgctcacaaactttcaagttttgaagtactggggaaagagagacacaaacttgaatctaccaaccaactcctctatctctgttacattatcccagaaagacttaagaaccttgactaccgttaactcctcgcgtaactttgaaaaggattcgctttacttaaacggtgtctctcacagcattgaaaatgatcgtaccacaaactgtttggagcaattgagatcactgagacaacagcttgaggaggatgatcctaaccttccaaagctatcccaatggaagctacacattatttccgagaataacttccctacggctgcaggtttagcttcctccgctgccgggttcgccgccatggtcgcagctatttcaaaattgtatgaactgccccaggacgcctctgagcttagtcgtatcgcaaggaagggtagtggctccgcttgtagaagcatgttcggaggttacgtcgcctgggagatgggtgagaaattggacggaactgactctaaggctgtacaaattgctccacctgagcattggccaaatatgaaagctgctatctgcattgtctctgatcttaaaaaggatgtttcctccacctctggtatgcagactactgttcaaacttcagaactgttccaatatagagtcaaccaggttgtccctcctagatattctcaaatggttgatgcgatcaagaaccgagatttcgaaacctttggtactctgactatgaaggactcaaactcttttcatgccacctgtttggacagctacccaccaatcttctacttgaccgatacctctaagaaaattattaagttaattcacactctcaacgacgcaatcggtaaagtcgtggctgcctacacttttgacgccggtccgaatgctgttatatactatgaatctgagaacgaggaagtagttttgggcgtgttgtttggtgtgttgtctaatgttgatggatggaatgaaatgaatagtgctacgctgaaggttcccgagggtgttccactttcatcattggactcgactatagcttctggtgtgtctagagttatcctgactcaggtaggagaaggacctaaggaaagtgacatgttcttggtcgctccataa

SEQ ID NO: 3594 - DNA, 492 bp, Artificial Sequence
  Optimized genes for Pichia pastoris
atgaactcttcaaagagatcaatttccatcccaagatcattctcaaaactgctaagttgtggttctttctctttggtcgctgtaagtgacgagtccctgactgcttttaacgacttgaagttaggaaagaaacataagtatgtcatttacaaaataaacgatagcaagaccgaaattattgtcgataagatctcttctgacgaatcttatgatgccttccttgaagctcttccagaagatgactccagatatgcagtttacgattttcaatacgagatctcgtctaccgaaggaaagcgttccaagatcattttctttacttggtcccctgagactgctagcgttaggtctaagatgatctacgcttcgtctaaagatgctttgagaagagccctcaatggtgtgagtactgatattcagggtacagacttttcagacgttgccttcgagtccgtgttggagagagtttctcgtggtgcaggctcccactaa

SEQ ID NO: 3595 - DNA, 897 bp, Artificial Sequence
  Optimized genes for Pichia pastoris
atgcctattgaaattaagggtaacgacgtcgtgattacatcttcttctaccactcaaactcaagtcagaatcaacctcttcggtgctaccgtctactcatggactattgctggaaaagagcaattatggacgtccgatgccgctttgttcgacggttccaaaccgattagaggtggtatccctctggtattcccagtttttggtaagtcctctgcaccaggttttgagaagctgcctcaacatggtttcgctagaaattcaacctgggaattcttggggcaaacccacgctaacccaccaacagtacagttcggactaagccccgataacgtgaatagaaaggtttacaataactgggataacggtgataatgagttttcggttatctataccattgcattggaagacgagcaattggtcacttcagttgaaatacaaaatactgatcaaaaggaatggaaatttaattggctttttcatacttatttcttggttgacgacatagaagatactttgattaacaacctaccaggagaaaaatgtaacgaccgtgttgttcacgaaatctacacagagaagcacccaattattagtttcgatcaagaggttgaccgtgtttattctgatgtctccactgacaagttactgcagatcatcgagctgggtaaggtcaagcacaatattaaaagagtaaaccttcctgacgtggttgtctggaacccatggtctgagattgttaaggaagtcgccgactttgaacctaaagagggctacaggagaatggtttgcgtggagcctggctacgttgagcagcttaagatcttgaagccaggacagagttggaccgcttctcagatcttacataagggagatgatatcaacttgcaggccatttaa

SEQ ID NO: 3596 - DNA, 603 bp, Artificial Sequence
  Optimized genes for Pichia pastoris
atgtctattccaccagaagtcttgtgggcccaaagatcaaataaggacgatacctcgaaaaacgttgtttacttgacaatccgtatcgctgatccagaaaatattaaggtagatttacaaccaggctctctagagttcgatgctgactctaggggttctaagtaccacttgtctctcgagttctttgatgaggttgacgttgaaaagtctaagtaccatactgcaggatctcatttatttttcgtcctacaaaaaaagaacgctagcgaggagttctggcctagattaactaaggaaaaagtcaaactgcactatttgcacactgattttgatagatgggtggatgaggacgaacaagatggtgaggaagctgaccctaccgtgcctgatccgtcccaagggatggacttttcctccttgatgaataacgaggccttgagtcagagtctgtcctcagacgctggtcagcccgacatggccgcccttatgcagcagctgcaaaactctggtgctggtggattgggtggtgaaggagaccaggcacttgacagagctcttgaagaggattcctcagacgaggaagaagaggataagcaagaataa

SEQ ID NO: 3597 - DNA, 1089 bp, Artificial Sequence
  Optimized genes for Pichia pastoris
atgtctcctgccattaatattgcgatcattggtgctggtattgttggtagcgctttcattaaccaattgagatcggtgtcgtctttatttgacttcaacgtcatctacctggcaaagagtaagtctgctttaatttcttatgattttaaaccactaaacctggctaattggaaggcagacctggataactcttcattgaacccattaaccgtagaggagctattgaagtttctcaaaaattctccactaccagccattttggttgacaacacttccagtgctgacgttgctttcgcttacccacagtttgtctccaacggtatctcagtcgccacgccaaacaaaaaggctttctctggagacctgaacctttggtcagagatctttaaggcctcgggtgaacctaatggaggtttggtctaccatgaggcaacagtaggcgctggcttgcctgtgattagcaccattaacgatcttgtcaacaccggagataaaattgaaaaaatcgaaggtattttctctggatctctttcctatatctttaatagattttctactacaaagccaaacgatatcaagttctccgagatcgtttctaaggccaaagaattgggttacactgaacctgaccctagagatgacctgtcaggtttggatgttgccagaaaggtaaccatcttggcaagattatcaggtttcaacgttaagtcaccagacagcttccctgtcgattccttggttccacaggaacttgagactttggaaacttccgatgagtttctttcacgtctccacgaattcgactcccaagtgggtcatttgaaggagcaagctgcctccgagggtaaagtgttgagattcgttggtaccgttgactttccgaacaataaggtttccgttggattcggtaagtatgatgcttctcaccccttcgcttctttacaagggtctgataatgttattagtataaagactgagcgttaccagaatccccttattatacaaggcgcaggagctggagctgaagtcacagccgccggtgttttggctgacgtcatcaaaattggacaaaggatcagtaagctgtaa

SEQ ID NO: 3598 - DNA, 951 bp, Artificial Sequence
  Optimized genes for Pichia pastoris
atggctgacaacagagaggtcttggttctgagaggtaccttagagggtcactctggttgggttactagtttggccacctgtcccaccaacccggatattctcttgtctggttctagagacaagaccttgatcgtttggcagttgaatggtgacgatcaagcctacggagtaccaaagaaggctttgaagggtcattcccatatcgttagtgactgtaagctatcattggattcggaattcgcactgtcatcgtcttgggataaaactgtacgactttggaaccttaaaacgggtgaaattattaaatacgctggacacaccagcgatgttctgagcgttgatctgtcgcaaaatctcagagtgattgcttctgcatctagagataagacaattaaattgtggaacatcgtcggtgaggaggttgcgacattagaaggtcataccgactgggtcactagtgttaggttcgtaccagggtccgccagcgacataatttccgcttcttccgataagttggtcaaatcatgggatttaaatgagatgaagttaacagctgacttcgtgggccacactggatatgttactgcaatcactgtttccccagacggttctttgtgcgcctcagcaggaaaggacggctctattatcttgtgggacttctccgtgaagaaagtgttgtacactcttgacgccaaggaggaagtccacgccgtcgctttttctcctaacagattttggctttgtgccgctacttccaagtctattaagatttttcacctagaaaagcgtaagcctatggatgagcttaagccagaattcgtcagtacatctaccaaagctcgtgaccctcattgtatctctctagcttggtccgctgatggtcaaaacctgttttcaggatatactgataatgttatcagagtttggcaggtcatgacttcctcttcataa

SEQ ID NO: 3599 - DNA, 1875 bp, Artificial Sequence
  Optimized genes for Pichia pastoris
atgtcttcctcaaacaaagagttcgatggcgactctatcggatcctctgattcattggatattgagtcaggtaatagagaccctaagactcagaacccccaagcgtatgtaccatctgataacgaggatagaatgtccgaattatcccactatgcctccaccccagaccagtctttgaaaatggttcgtactgagaccaagaagagcttgaaggacctgggtgtcagtgacgaattgcccactttggatcctaacagaccaatcgccgtagaaaaccctattttccccgaagagtattacttggagacagagaccggtttggtgccagtcgctaccttgcaagatctgggtagaaacccaactgcactcgagaaattgcgtaaggagaagtctagagccttccctcaaccaaatggtgaagctcctattttgaaagactcgtctgacgtagagaccttcaagagtaaggagtactctcccgaaattgagttcgtgactttcttgatcaacgaccctgaaaatccttacaattggccaactttcactaagtgggcttacacaattattctttccatactagttgtggctgtcgcctttggatcttcttgtatctcgggggccctattcacggttgaggataactacaacgtcagtctcgaggtcgctattctgaccgtctctcttatggtcttgggattcagcctgggcccactgttgtggtctccattgtctgagcaaatcggaagacgttgggtgtacttcatttctttggggttatacaccatttttaacattccgtgtgccttgtcccctaacatcggtggacttcttgtttgtcgattcctgtgtggtgttttttcatcctctgctctgtgcttagtcggtggttcaatagcagacatgcatccatcagaaacgcgtggtaaagctatcgcttacttcgccgccgctccatatggtggaccagttataggtccattggtttgtggttggatcggtgtcaagacaaacagaatggatctcattttttgggttaacatgggttttgctggtttcatgtggctattggttgcttgcatccctgaaacttaccaacctgttattctcaagaacagagcaaagaagctgaggatggagctgaataacccaaacatcatgactgagcaggaagctaatccacttaccttcaaggaattagttgttacttgtctgtatcgccctttgatgtttgtttttacagaacctgtgctggatatgatgtgtgtatacgtttgtttgatctactcgttgttgtacgcattcttcttcgcctacccagttatttttaatgaactgtacggttacgaagacgatttcattggattgatgcttatcccaatcttaattggtgctttccttgcattggtcacaactcctatcttggaatctatgtacgtcaaaatgtgtcaaagaagaaagccgacaccagaagatagattggtgggagcgatgattggaagcccatttcctgctatcgctttatttattcttggtgccactagttataaacacatcatttgggttggtccagcttcctccggaattgcttttggttatggaatggtccttatttactattccttgaataattatatcattgacacttatgctaaatacgcagcttcagctctagccactaaagtttttttaagatcggctggtggcgctgcatttcccttgttcaccacccaaatgtaccataagcttggcttacagtgggcctcctggctactagcatttatctcacttgctatgattttaattccttttgttttttatatatatggtgcccgtttgagggctaagatgtgcaaggagaattactctgaaatgtaa

SEQ ID NO: 3600 - DNA, 2121 bp, Artificial Sequence
  Optimized genes for Pichia pastoris
atgagtaagtctgaatcctacgagttccaagcagagatctctcagttactgtcactattcataaataccgtttattcaaacaaagagattttcttgagggaacttattagcaacgcttccgacgctcttgataagatcagataccaatctctttctgatcctaaagtcctggagaccgagcctgaattgttcattagaataaccccaaaaccagaggaaaaggtgttagaaatcagagattctggaattggaatgactaaagccgatttggtcaacaatttgggaactatcgccaagtcaggtacgaaggcctttatggaggctctctctgcaggtgccgatgtttctatgattggtcaattcggagttggtttctattccttatttcttgtagccgaccacgtccaagtgatttcaaaaaacaacgacgacgaacaatacatctgggaatccaatgctggaggtaagttcacagtctctttggatgaaactaacgagaaattgggcagaggcactgttttgagactctttctcaaagacgatcagttggaatacttggaggaaaagcgaattaaagaagtagttaagagacacagtgaattcgtctcataccctatacagttagtggtcaccaaagaggtggaaaaggacgttccagttgaagaagaggaggagaagaaggaggagaccgaggaagacgataaaaagccaaagctggaggaggttgatgatgaggaagataaaaaggaagaggagaagaagattaagaaggttaaggagtctgtgaccgaaactgaagaactgaataagactaagccgttgtggaccagatcaccttcggaagtaactcaagacgagtacaacgctttttataaatctatttccaacgactgggaagaccccctagcagtgaagcatttcagtgtagagggtcaattagaatttaaggctatcttgtttattccaaaaagagccccattcgatcttttcgaaagcaaaaaaaagaagaataacatcaagctttatgttcgtcgtgtcttcatcacggatgaagctgaggagttgattcctgaatggctatctttcgttaaaggtgtcgttgattctgaggatttgcctttgaacctgtcgcgtgaaatgctccagcaaaataggatactgaaggttatcagaaagaacattgttaaaaagcttatcgagacttttaacgagatcgctgaagacaaggaacagtttgaaaagttctactcagccttttccaaaaatcttaagctaggtgttcacgaggacagtcagaaccgtagcgctttggctaagttgttgagattcaactctactaagtctacagaagagttgacatctttttcggactacgttactagaatgccagagcatcaaaagaacatctatttcattaccggtgaaagtgttaaagctttggaaaagtccccatttcttgatgctttgaaggaaaagaacttcgaggtccttttgctgaccgaccctattgacgagtacgctatgacacaattaaaggagattgaagacaagaagctggtagatatcactaaggactttgagcttgaagaatccgaagaggagaagaaggctagagaagaggaagtgaaagattttgagcctttaacaaaggccttgaaggaaattttgggtgacaaagttgagaaagttgtcgtttcatataagttggttgattcccccgccgcaattcgcacttcccaattcggttggtctgcaaatatggagagaatcatgaaagctcaagctttacgtgataccaatacaatgtcctcttacatggcaagcaagaagatctttgagattagtcccaagtccccaatcatcaaggcactgagaaagaaagtcgaagctacagggaccgatgacagagtcgttaaaaatttgactaccttattgtttgacactgcgctactaacttcaggattcaccctggatgagccaacttccttcgctgctcgtattaacggtttgatttctattggtctgaacattgacgaggaggaggaaaaggagccagaacaggccacggaagccccatcggaggaagctgtcgctgaatctgccatggaggaggtcgactaa

SEQ ID NO: 3601 - DNA, 375 bp, Artificial Sequence
  Optimized genes for Pichia pastoris
atgactttccatttttcaatcattttccacattagatttactaataccttcttggacaacacgaaatccaatcaaattaaggtcattaagacccctggtggcgtattgcgtgcacaacacactaaaaagagaggtacaacccctaaatgtggagattgcggtatatctttaccaggtgttgttgctcttagaccacgagagttttcccgtgccaaaaaatcggataagagtgtttctagaccctacggtggaagcaggtgtggaaactgtgtgaaggagagaatcatcagagctttcttgatcgaagagcagaagattgtccagaaggttctgaaggaacaagctgaaaaggagaagcaagccgaacagaactaa

SEQ ID NO: 3602 - DNA, 6648 bp, Artificial Sequence
  Optimized genes for Pichia pastoris
atgtctagtgtcaaccactccttacgccactccaaattgccaccacacttcttaggactgaatagcgtagaagttgctgctccttctaaagtgagagactttgtcagagaccatggtggtcattccgtgattactagagtcttgatcgccaacaatggtattgccgctgttaaagagatccgtagtgtcagaaagtgggcctacgaaactttcggtaacgacagagccattcagtttattgtcatggctaccccagaggacttggaagctaatgccgaatatatcagaatggctgatcagtacgtgatggttcctggaggaactgcaaacaataattatgcaaacgtggatctcattgttgaaatcgctgagagcacggatgctcacgctgtttgggcaggttggggtttcgctagtgaaaaccctcacttaccagaacaacttgcagcttcgcccaaaaagattatctttatcggtcctccaggatcggctatgagatcccttggcgataagatttcttctacaattgttgcacagcacgctaaggttccatgtattccatggagtggtactggagttgatcaagttattattgatcctgtttcgaacttggtctcagttgacgaggagacctatgctaagggttgttgctccgatccccaagatggcctcgctaaagctaaggcaattggttttccagtgatgatcaaagcttctgagggaggtggaggaaaaggtattagaaaggttgatagggaagaagacttcctttccttgtatgatcaagctgctaacgaaattccagggagcccaatcttcatcatgaaattggctggtgacgcaagacatctggaagtgcaactcttggccgatcaatatggtactaatatctctttgtttggtagagattgttctgttcagcgtagacaccagaagatcatcgaagaggctccagttactattgctaagcaagatacttttagacaaatggaacaagccgcagtgcgtcttggtcaattggtcggatacgtttctgccggcacagtcgagtatctgtactcacacgctgaggacaagttctacttcttggaattgaacccaagattacaggttgagcatcctaccactgaaatggctactggagtcaacttgcccgttgcacagctattaatcgctatgggaattccattgaacagaattagagacatacgagtcttgtatggtttggaacctaacggtgccactgaaattgacttcgaatttaagacagaagagtcattgaagtcacaaagaaaaccaatacccaagggacacaccattgcttgtagaattacctccgaggatccaggagagggctttaagccttcaggtggagcgttgtacgaattgaacttccggtcctcctcttctgtttggggttacttttccgttggtaacaaatcctctatacactcattctccgattcccagttcgggcacatcttttctttcggtgaaaacagacaaatagcacgaaagaatatggtggtggccttaaaggagttgtccatacgtggtgacttcagaaccactattgagtatctaatcaagcttctggagactgccgactttgaaaataacaccatcactacaggttggctagatgaactcatatccaagaagttgaccgctgaaagaccagacgaaactaccgccatcttatgtggtgctgaaaaaggtcagatcccaggtaaggagcttttgcgtaccattttcccaattgaatttatctacgaaggtaagaagtacaagttcacagttgtccaggccgctttcgacaagtacaacgtttttgtcaacggttgtatgatcaccgtttccgtgactcacctgaaggatggctctcttttggtagctctcgacggcaagagccattcagtctactacctgcaggaggaggtaggtaatactagattgagtgttgatggaaagtcttgcattttggaggtcgaacacgaacccacagaactgcgtactccatcccctggtaagttaatcaagtaccttgtcgaacacggagaccatgttaagattggacaaccatacgccgaggttgaggtcatgaagatgtgtatgcccttggtctctcaggaaaatgggacaattagattgctaaagcagcctggatcgagcgtagccgccggagatattttggcaattttggctcttgatgatccatcaaaggtaaaacacgctttgccgttcgacggaaccatccctgatatgaagcaaccattcattcatagcaacaaaccagtctataagttcatttctctgctttctgttctaaaaaacattctcgccggttacgacaatcaggttgttatgaacgataccctccaatcattgctagatgtcttgaaaaatcctgagttaccttattctgagtggaatcattctatttccgccctgcactcaagacttccaatccaccttgacgagcaactaacgtctttaatcgagagatcccaccagcgtggtgcagactttcctgcaaagcatctgttgaagcttttagacaaggagcaagcagttaacccggatccactatttagtcaggtcattgccccattgaccgctgtcgccaaatcttacgaacatggattggaggttcatgagcataacgttttcgcagatctgattacccaatattatgacatagagtctttgtttgcagacaagagagaggaggacgttatcttgcagttaagggacgagaacaaatcctctctagacaaagttattgatgtcgtgcttagtcattcaagagtcggcgctaagaatcatttgatcagggctattttagaaatctaccagactatttgccaaaacgacttgcaggctgcaactatattgaagaagcctctgaagaagattgttgaactagattctagatttactgcgaaagtttctttgaaggcccgtgagattctgattcagtgttctctgccttctattaaggagagatccgaccaattggaacatatcctcagatcctccgttgttcaaactcaatacggtgagtctttcaacggtaactataagttgcccaacttggacgttatccaagatgttattgactccaagtacatagtctttgatgttttaactcagtttgtcgtgtcccccaataaatacattttcgcagctgctgcagaagtctatttaagaagagcctacagagcctactctgtccgtgaagttaagcaccatttcgtaggagattcagcccttccgattgttgagtggaagttccaattgccattgctgtctactgccgcatacaactccgttcctgaagctatgagaaactcttcctccaatcgatcttcaatcagcatggacagagcagtttccgtctcggacctgaccttcatgatcaataagaacgacagtcaaccactcagaacaggtattatcattcctactaaccacctggacgacatcgaggaatccctctcttctgccattgacgtctttccaaagagaccaagaaacaatggtcctgctccagatcggactaacgttgccccagagcaacctaccaatgtgtgcaatgtcttcattgctaacgtttctggttacaactctgaggctgagattgttgataagatctcgtctgttttgagtgagctgaaggacgatttaagggcttcaggggtcaggagagttacctttgttttgggtgataaagttggtacttacccaaagtactatacatttaagtttccagactactttgaagatgagaccattagacatatcgaaccagctctggctttccaacttgaattgagaagattgagtaatttcaacattaagccagtaccaaccgagaacagaaatatccatgtttacgaggctgtagccaagaacacttcttgcattgatcgtcgtttctttaccagaggcatcatcagaacctctcgtattcgtgaagatgtgaccatttctgaatatctcatatcagaggccaacagactcatgagcgacatcttggacgcattggaaatcatcgacacttcgaacacggacctgaatcacattttcattaacttctcagccgtcttcaacgtaactcccgatgacgtcgaggctgccttcggaggttttctagagaggtttggtagaagattgtggagacttagagtttccgctgctgagatcagaatcatgtgtacagatcctgagactggtattccattccccttaagagctttgattaacaatgtatcgggttacgttgttaaatcagaaatgtatcaagaagtaaaaaacgatcacggagagtgggttttcaagtccttgggtccaactcccggttcaatgcacttgcgccctatttctacaccttacccaaccaaagagtggcttcaacctaaaagatataaggctcatttgatgggtaccacatacgtctacgatttcccagaattatttcgccaagctactttgagccaatggaagaaatattctccaactgctagggttccttctgatgtgttcgtcgctaatgaactgattgtagatgactcaggtgaacttactgaagttagtcgagagcctggagctaacgtggtaggtatggttgcgttcaaggttactgctaagacccctgagtatcccagaggtaggcacttcatcattattgctaatgatattacattcaagatcggtagttttggacctcaggaggatgaatattttaataaggcaactcagttggcccgtaagcttggaattcctagaatttacttgagtgctaattccggagccaggatcggtgtggctgaagaattgttaccactattcaaggtagcctggaaggaagagggtaagccatctaagggttttgaatacttatatcttacctcggaggaccttacgctattggagaagtccggtaagtccaactccgtcacaactcaaagaattgtcgaagagggtgaggaacgtcacgttatcactgctattattggtgcttctgacggactgggtgtcgagtgtctacgtggttcggggcttattgccggcgccacttcgagagcttacaaggatatttttaccattacgctggtaacttgtagatcagtcggaattggtgcttatttggttcgtttgggccaacgtgctatccagatcgaaggtcaacctattatcctgaccggtgcgccagccatcaataaattacttggtagagaagtgtacagcagtaaccttcaattaggtggtacccaaattatgtacaaaaacggagtttcccacttgactgccaatgacgacctggctggagtagagaaaatcatggactggctggcttatgtgcctgctaagagaaacatgccggtccctattcttgagtctttgcacgacaaatgggacagagacgttgactacaaaccaaccagaaacgaaccatacgatgtcagatggatgatctctggaagagaaacacctgatggagaattcgaatctggcctgttcgattctggctccttcaccgagactcttagtggctgggctaagggtgtggtcgtcggtcgagctagactgggtggaattccaatgggcgttatcggtgtggagacccgtgttactgaaaacctaatccctgccgatcctgctaatccggattctactgaaatgatgattcaagaggctgggcaggtttggtaccctaacagtgcctttaagactgcccaagctattaacgactttaacaatggagaacagttgcctttgatgatcctggccaattggagaggttttagtgggggtcaaagagatatgtacaacgaggtcttgaaatacggttcttttattgtagatgctttggtcgatttcaagcaaccaattttcacatacatcccgccaactgcagaactgagaggaggttcttgggttgtcgtggacccaactatcaacgaggacatgatggagatgtacgctgatgtcgaatctagagctggtgtcttagaaccagagggtatggttggaattaagtatagaaaggacaaactgcttgctacgatggagcgactggatgctaagtacgccgaactgaagtcgaaggtgtctgacacatcactttcagagaaagatgtttctgaaataaaaaagcagatagagcaacgcgagaagcagttacttccaatttacgcccaaatctctatccaatttgctgatttgcatgaccgttccggtagaatgttggccaaaggagtcattaaaaaagaactcgagtgggtgaattcccgtaggttctttttctggcgagttcgtcgtagattaaacgaagaatatttaattaagcgtatcacagagttcttgtcagcctcagctactcgtttggacaaaatctctaggataaactcatggctgccaacctctattgaccttgaagatgaccaaaaagtggcaatctggttggaggagaatcgtaaagctttagacgcaaacatcaaggagcttcgtgccgagcatgttcgtagaacgttggcgaccttggttaggacagatatggataccacctcaaagtccttggccgagctaatcaacttgttgcctgagacggagaaggagtcaattttgtctaagatcaaaagctaa

SEQ ID NO: 3603 - DNA, 1698 bp, Artificial Sequence
  Optimized genes for Pichia pastoris
atgtctttctctccaagaatagtcccaacaactgctttctctgatcagaaaccaggcacaagcggactgcgtaagaaggttacagttttccaacaaccaaattacaccgagaacttcctacaagctatcttcgattctattccagaaggtgcacaggattccgtcctcgtcatcggtggtgatggaagatattataacgacaccgtggtccaattgattgctaaaattggtttggctaatggagtgaaaagaatcatcgttggacaaaatggaattttgtcgactccagctacttcacatattattaggacctacaaagacgttaagccaacaggtggtatcatcctgactgcatcacataacccaggaggtcctaccaacgatttaggtatcaagtacaacctaagcaatggtggacctgctcctgaaaccgtcacggataagatgttcgccaagtccttggctctgactgaatacaagattattgaaaatcttccaaccattgatttgtctaagttgggtctatccaagtgtggtccactcgaagttgacattatccactcgaccgaggcttacgttgaaatgttgaaagatatctttgacttccctttgatcaagtcttttattaaacgtcgctctcccgagggttttaaggttctgttcgatgccttaaacggtgtcacgggaccatacggcaagtcaatttttatcgatgagttgggtttaccggagagttccattcagaactgtgttccaaaagcagattttggaggtctgcacccggaccctaacttaacttatgccaagactcttgttgacagagttgataaggagaacatcgctttcggtgctgcttccgacggtgatggtgaccgaaatatgatatatggtgcttccaccttcgtttctcctggagatagtgtggctatcattgccgagcacgctgaatctattccttactttaaaaaacttggagttcacggtttggccagatccatgcctacttccggcgccttagacctggtcgccaaggcaaaagggcttaacgtgtacgaggtacctactggttggaagttcttctgtgcccttttcgatgcaaaaaagctttctatttgcggtgaggagtcctttggtaccggttctgaccatattagagaaaaggacggtttgtgggccatcgtggcgtggttgaacgtgttggctgcttttgacgctcaacatcccgagatcgagggtggcgctactattgcactcgtccaaaagaatttctgggaaacttatgggaggacattctttaccagatacgactatgaaggttgtgagtccatccctgccaacaagttgatagagtttttgcaagaaaaagttgacgacacttcttttgtcggtagtgagcttgctccaggatacaccgtcaaagaagccgccaacttctcgtacactgaccttgacggctctgtttcttcaaagcagggtctatttgtaaagttcacaagtggtttacgtttcattgtcagattgtccggaactgggagttcaggagctactattagattgtacctggaaaagcacacttcagataagtcaaagaacagcttatctgcatctgaattcttggctgatgacgtacgtttcgttctgaattttttgcaatttcagaagtttgttggaagagaggaaccagatgtaagaacctaa

SEQ ID NO: 3604 - DNA, 324 bp, Artificial Sequence
  Optimized genes for Pichia pastoris
atggcagaagagaacagattatacgtaaagggtaaacacgtttctttccaaagatctaagtccgtcattcatcctaagactagtttgattaagatcgagggtgtcgagaattcgaaggatgctgaattttatatcggtaagagaatcgcctatgtttacaaaggtgtcaaggccataaacggaaccaaagttagggttatgtggggaactgttacccgtactcacggcaattctggggtggtccgtgctaaattcgaaagaaaccttccaggtcagagctttggatccacagtgagaattatgctgtacccatcaaacatttaa

SEQ ID NO: 3605 - DNA, 1251 bp, Artificial Sequence
  Optimized genes for Pichia pastoris
atgtccctgtctaataaattgagtgttaaggacctggacgtcgccggaaaaagagtctttataagagtcgacttcaacgtcccattagatggtgacaagattacaaacaatcaacgtatcgttgctgccctacctactattcaatacgtacttgatcataagcctaaggttgtcgttttggcctcgcacttgggtcgacctaacggtgaagtaaaccctaaattttccttaaaaccagttgccgccgaattgtcctctcttctcggaaaaaaggttactttcctgaacgacagcgttggacccgaggtggaaaaagctgttaattccgcctcaaatggggaagttatccttttggagaacttgagattccacatcgaggaggagggatcacagaaaaaggacggccaaaagattaaggctgacaaggaagccgtcgccagatttagaaagcagttaaccgctctggccgatgtttacgtcaacgatgctttcggaaccgcccatagagctcactcttccatggtaggtttcgaattggagcagcgtgccgctggtttcttgatggccaaagagttgacgtactttgcaaaggctttggaaaacccagttagaccattccttgctattcttggtggtgctaaggtctcagacaaaattcaactgattgataacctattagataaggtggattctataattattggtggtggaatggccttcacttttattaaagtcctggataatgtagcaatcggtaactcattgtttgacgaagctggagctaagttggttcctggtctagttgagaaggctaagaaaaataatgtgaagcttgttcttccagttgacttcgtgactgctgacgcgtttagtaaggatgctaaagtcggggaggcaaccgtggaatctggcatcccagacggactccaaggtttggatgctggtccaaagagcagggagttatttgctgctactatcgctgaagctaagactatcgtttggaacggtccacccggtgtcttcgagttcgataaattcgcagaaggtacaaagtcgatgttggccgcagcaatcaagaacgctcaaaacggtggaactgttattgttggcggcggtgataccgctaccgttgctaagaagtttggtggtgcggataagttgtctcatgtctccacaggtggtggagcatctctggagttgttggagggtaaggaattaccgggagtggtctatctctctaataaggcataa

SEQ ID NO: 3606 - DNA, 861 bp, Artificial Sequence
  Optimized genes for Pichia pastoris
atgtccaatcagtacaacccatacgagcaaaatcagtcatacgagctgccttcttataagggtggtaacaatgacgattttgttaaattcatgaacgaaatcgctgatattaatgctaatttggacaactatgaggagctggttaagatcattgagcaaaaacaaactcagctcgtaaacgaggtgaacccagaccaggagaactcacttaagcgtcagttggattctttgattagcgagtcttctagtctacaactctctttgaaatccaagattaagaacgctcaacaattggcaataggagactctgccaaggtcggtcaagctgaaacatccagacaaagattcttgcaggccattcaagattacagaatcatcgaatccaactacagggaacaacaacgcgtccaggccgaaagacaatatcgtgtcgtcaaacctgacgcttcacccgaggaagttagagacgccatcgatgacctgggtggacaacaggtttttagtactgccctattgaacgctaatagacgtggagaagctaagaccgcgcttcaagaagtacaatctcgtcatagagagttgcaacgattagaaaagactatggctgaattgacgcagttgttccacgacatggaggaaatggttgtcgaacaggatcaacacgttcaggagacagagaatcttgttgatactgctcaacaagatattgaaaaggctgtgggtcataccgataaagctctgacctcggcaaagaaagccagaaggaagaagtgcatctgtttctggatttgtgtgttaattatttgtattttagcacttatcctgggtttgggctttggagttggtaactgggggagataa

SEQ ID NO: 3607 - DNA, 1035 bp, Artificial Sequence
  Optimized genes for Pichia pastoris
atgaatcaaattgagcagtctggaccaatcgattgttcttctctcaagttggggtctagaaagtccgctcttgccattattcaggccgaaatagttaggcaattgattttgaaagaatatccagaattagagaccaagctggtcagtgtttcaacactgggtgatcaagtccagaacaaggctctgttcacttttggaggcaagtccctgtggaccaaggagcttgaaatgttacttcttgaatcagttggaggtttcgaccagatcgatatgatcgttcactctctgaaggacatgcctacccatttgcccgacgagtttgaactaggatgtattatcgaaagggaggaccctagagatgcgttggtcgttcaagatggcctgtcgtataagagtttagcagacttgcctgagggagctgttgttggaacctcttctgtaagacgttctgcacaactattaaaaaacttcccacatctcaagttcaagtccgttcgaggtaacttgcagactagattgcgtaaacttgacgatccagactcagagtactgttgtttactcttggcagctgctggtcttattcgcacaggtctgcaacacagaatcagcatgtatttgaacgatgacgttatgtaccactccgtgggtcaaggtgctctaggtgtcgaaattagaaaaggtgatcaatttatgaaaaatatttgtgaaaaaatcggtcaccgtactaccactttaagatgtttggccgagagagctctattgagatacttggaaggtggttgctcggtcccgattggtgtgtcaactatatacagtgaggacactaaggagctgaccatgaattcccttgttgtcagctgcaatggaagagattctgtaacagaatccatgactgaagtggtcacgactgaagagcaagctgaggatttcggcgagcgtttggcccaaaaattgattgaccagggtgccaagagaatcttggatgaaatcaactttaacaagatcaaggagattaaggaggaaggtttgcattaa

SEQ ID NO: 3608 - DNA, 792 bp, Artificial Sequence
  Optimized genes for Pichia pastoris
atgtcagcttctacctattcgtttgatcaagctatggatttcgacattgttcaatctgttacttccactcaagatcatatcccaatggttttgggtgaatccgttctcagatccttcgtgggcaacgacgcaaacaaagcacctgctatcaaacaagaatacgaagctcttccactgaacgctcagattgtcaatccagagctgacaccttccgttggtaccatctcaccgctggagatacacaccagtgtcctagactctgttttatctacagacttcactgatgccgacaattctcccatgtttgagtcacctgagagtgaggatccaaacaactgggtgtcactattcgctgacgagaccactttggcaacgactccagccgtctccagagctccagctgcttctgccagcccagtcgtcccctctttgaagactacctctggtgatgagcagcagttgacagtgaaacaatttgttgagtacccaagcgctaaggacaagctgtccccaaagtccgtcgaaaaaaagattagttttaagaaggatcacttgggagtcgtaggatacaccagaagacaaaggtcatctcctcttgcccctattgtggttaaagatgacgatcctgtttctatgaagcgtgccagaaatactgaggccgcgcgtagatcgcgagccaaaaagatgaagcgtatgtcccaattagaagacaaagttgaagaattattgatttgtaagtctgaacttgaagcagaagttgagagattgaagtctttggtaaagcatcagtaa

SEQ ID NO: 3609 - DNA, 561 bp, Artificial Sequence
  Optimized genes for Pichia pastoris
atgggtaaggtgcataccagtaaacaacacgtcaaaacatcacatcgtaaggctccaaaatccgaaaatacttatcttaaatccctcgttgagttgtactcttacttggcaagaagaaccgacgccgaatttaacaagaaggtgagacgtgcattgaacttctctaagattaatagaccaccagtttcagttggtaagatttcccaggccttgaagaaggaggaaaacgccggaaagatcgttgtagttgtcgggactgttactgatgacatcactctgttggagttcccccaagcgaccatcgctgctctgagggtcacggccacagcaagagctaagatacttaaagctggtggcgaaattttgactcttgatcaattagccttgaaggctccacaaggtgaaaacaccctgttgttagctggttcgagaactgctcgtgaggcttgtagacactttggttttggtcctcaccagaagaaggcccctagaattctatctaccggaagaaagttcgagaaagctagaggacgtcgccagtctagggctttcaaagtctaa

SEQ ID NO: 3610 - DNA, 1155 bp, Artificial Sequence
  Optimized genes for Pichia pastoris
atggacatcgcactggagatacttgacactttcgtctttgacaaggtttatgccaaacttctacctatttccttggtccagcacttgccggatggttatctgaagactttgggtcacctcacaggggccaacaatactatggaatcacttttcggaatcgctccaaacgttgaccaagcttctaagaatcattggttgagaaccgtcaacgacagcattgctttggctagacctggcgaaagattagtttatggcgtaaacgcccctttgcatttctttgacgagactgcatatacctacgcctcgattctcggtagatctaatatcatccgtcagttcaccactttgatgatcctaatgatcttgttcggttggggactttaccttagtgtcgcttccttctcctactatttcgtgttcgataaggctattttcaaccatccaagatacttgaagaaccaaatgtctctggaaatccaccaagccctaaccgcgatcccaaccatggttttgctgactgtcccatggttcctgattgaacttagaggatactccaagttgtattttgatgttaacgagtctactggtggatggaaggctattatttggcaaattccttgttttattatgttcacggactgctgtatttactttattcatcgttggttgcactggccatctgtatacaagcgtttacataaacctcaccacaagtggattgtttgtactccctttgcttctcatgcttttcaccctgttgatggatatgctcagtcgttaccctaccacttatatggtatgttatttccattgcataaagtgtcatacctcatcctattcggtcttgttaatttttggacagtcatgattcacgacggtgagtacttgtctcgagacccaatagttaacggtgctgcctgtcacacagtccatcatttatactttaactacaactacggacaatttaccaccttgtgggatagactgggtggttcataccgcatgccagataaggagttgttcgataaaaataagaagaaagacgtgaagacatggagatctcaggttaagcaagcagatagtatcagggaagatttggagggtaaagaagatttcagagagtacggtactgaggaaaagctgaaatccacttaa

SEQ ID NO: 3611 - DNA, 237 bp, Artificial Sequence
  Optimized genes for Pichia pastoris
atgccacgtcaaattaccgacatcaaaaaatttgttgaacttactagaagagccgatgttaagtctgccaccgttaagacaaattcaaagttcaactctaagggtgagaagtaccagcaaactaaattcaaagtaagaggagctagatacttatatactttgattgtcgaggacgctgataaagcaaagaagctggtgcagtccctacctccacaattgaaggtcactaagttgtaa

SEQ ID NO: 3612 - DNA, 582 bp, Artificial Sequence
  Optimized genes for Pichia pastoris
atgccccgtgctcctaggacgtactcaaaaacctactcagttcctaagacaccatatgattctgcaagattcgaccaagagttaaaattggctggcgagtatggacttaagaacaagaaggagatttacagaattggttttcagttgtctaaaattcgtagagctgctagagaccttttgacccgcgatgagaaggacccaaagagattgtttgagggaaatgctctgattagaagactggttagaactggaatactctctgaggaaaagcgtaagttagattatgtactagctcttaaggtcgaagatttcttagaaagaaggttgcaaactcaggtgttcaaattgggtctagccaagtctatccaccacgctcgagtgctgatttcccaacgtcatattgctgtcggaaaacagatcgttaccatcccatcgttcatggttagattggaatcccaaaagcatatcgactttgcaagcacttccccatacggtggtggtagagccggtcgtgtcaagagaaagaaccaagccaaaagttctgaagggggtgccgaggaagaagaggaggatgaagaataa

SEQ ID NO: 3613 - DNA, 936 bp, Artificial Sequence
  Optimized genes for Pichia pastoris
atgatctttaatctgaagaccttggcagctgtggcaatttctatttctcaggtctctgccgtatcctcgttaggtttcgctttgggtaacaagaacgtcgatgggacctgtaaataccttgctgactacgaagctgacttggacactattcgtggaggttctgaggccgtagctattagagcttattcggccgaggattgtaatactctacaatacttgggtcctgctgttgaggagaagggtttcaagctggttctatctgtgagaccattagacgagtcttactaccaagctgaaaagaacgctctttcagagtatcttccacaattgtctgtttcaacgctgcaattcttgtcagtcggttctgaagctttgtacagagacgacctcccagcctcagaccttgccgataagatcagggacatgaaggaatttttagccggattgactgataagaatggtgactcctacagctcagttcctgttggaactattgattcttggaacgttctggtggacgctagtgcggctcccgctattgaggccagcgatgctgtttatgcaaacgctttctcctactggcagggtcaaggtccatctaactccacctattcctttttcgacgatattatgcaggccttgcaggtcatccagacaatcaagggaagtactgatatcgatttttgggttggcgagactggttggccgaccgatggtgataattttggagatgccgttccttccatcgaaaacgcagataacttttggaaagaagccatttgcggcattagaggatggggaataaacacattcgtcttccaagctttcgatgaagactggaaagaagaggacgacgcagttgaaaatcacttcggtgtctgggacagttctcgtcaattgaaattggattctctcggttgtgatttttcctcctaa

SEQ ID NO: 3614 - DNA, 870 bp, Artificial Sequence
  Optimized genes for Pichia pastoris
atgtttcgcttgtctgttgcaaatatcgctagatctgctggagcgtctactcgtaactacgctactttgcgagaaattgagatgcgtttgaaatccataaagaatattgagaagatcacgaatactatgaaaattgttgcttccaccaggcttaacaaggctcagagagctatggctacatctagagtttatcacgaaggcgaccaagaggttttcacaaccgctgagactaaggctccagaggacgccgaaaagactttgttagtggttgtttcttccgataagggactctgtggttcgatccactcacaaattgccaagagtgccagattgagactgaaggacctgccaaacgctgacgtagtaactattggtgataagaccaaggtgcagttgctacgtacccatcctaacaacgtcaagttgtctttcaacggtatcggaaaggaagccccaacattttatgaggccgctttaattgccgatgaaattaaaaagcttggtgattatcaaaaaatcgaggtcttgtacaacaagttcgtctcaggtgttagctttctcccttcagagttctcagtcttctctaccgatgctataaaagcttccgaaaagctttccacttttgaggttgacgaggacgctgaaatccccgcaaccctttctgaatacggtttggctaactccattttaagtgcattggcagatgggtacgcatctgaaatttccgccagaagaaatgctatggacaacgcctctaaaaatgctggtgatatgatcaacaaatacagtatcctatacaacagaactagacaagccgtcatcaccaatgaactggtggacattattactggagcctcgagcctggattaa

SEQ ID NO: 3615 - DNA, 279 bp, Artificial Sequence
  Optimized genes for Pichia pastoris
atgtcctctttcctggacagatggttgtacagaatgagaggtacctcaaacactggtagctattactccactcctcagttatctactcgttcttcgggttttccagatgatgatccacaaacgactacacccaaccttcgtaacacaccaagagcctacttccacccagttattcctggagaccctttgaccgaagaagagtccttgaaaatgaagaagtcttcagtggactcaaggaagagttctgttgtctctgctagttccgaggagaatgaataa

SEQ ID NO: 3616 - DNA, 438 bp, Artificial Sequence
  Optimized genes for Pichia pastoris
atgaacctgcccgttaacgctgagcgtaagaagcgtatcctgaagtcttactcttatagaggaattgatttggaggctttactaaagttgtctaatgaagagttcggtaaattatgtacttccagtgttcgtagacgattctcaagaggtcttggagacagagaggagaggtttttgaaaaagttgagagttgtcaagttggccaccccaccaaacgaaaaacctgctgttgttaagactcacctgagaaagatgatcgtcgtcccagagatgattggttcggtggtaggcgtgtacaacggtaaaatttttaataccgttgaaattaagccagaaatgcttgggcactacctcggtgaattttccatgacatatactcctgtcagacatggtaaggctggtgttggaaatgcagccagattcgctgccttgaaataa

SEQ ID NO: 3617 - DNA, 171 bp, Artificial Sequence
  Optimized genes for Pichia pastoris
atggcccatgaatcagtttggttttctcacccacgtaactacggcaagggttctcgtcagtgtagggtctgtgcttcccatcaaggtttgatcagaaaatatggattgaacatttgtagacaatgcttcagagagagagctaatgatattggtttccacaagtacagataa

SEQ ID NO: 3618 - DNA, 993 bp, Artificial Sequence
  Optimized genes for Pichia pastoris
atgagtgcttcccagtttatgaagttaccatcgctgcagccctccagcgagcaaaatgcccttcctccattgcgttcattggctgcaggtttgtttcctactcgactgatgtcagaaaactcattatctatgcaacacaactcttccgcatttttggattcttacagtctttctcgtggatctttgagtcctcctatgtctcagggtctagaaagcatcggtagaagatccctcccatcgttgcctactttctcattcggggatgtgcgtaataattctctgacaagtaccagtagcagagcttcttctttgtctggtgatgacgttgagagcacaccctccgtcccaaactcgccaggctctatccacgccccaggttccatttcttctttgagaggtaagcgtagacagagatccggaccatcatgtgacgcttgcagagtcaggaaagttaagtgtgacgcggagataattatttctgattaccaagatctgtctatcgacgaaaagttgatgtttgacaaaaatacacaagataaccaaactttccaattgtccaatggattcactattctcaaaacgttagttaatatcaaatcctcaagagatgagaagtatattaagtatagatcttgcaccgcttgtaacaacagaacccttaagtgttgcttttcaaaaggtttcactagaaacgatatcgtcaaatacaacaaatttaagtctgagtcctccgacgaagaatgttccgttgccaagcgcgcaaagactgctcaaactactccacctccatcaaccaacttcgatagttcttcctcttctttatctcctaagtcaactctgaccgctccttcttccgtaaccccaccgctattgccagccagaagatcatcctgtcttaactgtaggagtaagaagattaagtgtgctagacttgaggactcggaacgttgtacccattgcgacaagaaggacttgtgttgttcgttcgagtaa

SEQ ID NO: 3619 - DNA, 4971 bp, Artificial Sequence
  Optimized genes for Pichia pastoris
atgtcaagcgacattcctatcgagtttacagagcccctgcaattaactgatattggaattcaaccacagtttttggatttcagatccactactttggagtctgatagatttgtatgtgtccgtgaacagggagccaatggtaataccgtttctatcatcgatctccacaacaacaacaacgttacaaagaagaacatgaccgctgataacgctattatgcacccatctcaaaatgttatcagtcttcgtgccaatggaactaccttgcaaatttttaatttggacacaaaacagagactaaagtctttcactatgtctgagcctgttatcttctggaagtggctaaacgagcagaccctcggtttggtcactcagaacgctatttttgagtggaatgtctttgatggtacaggagatggtccagttagacttgctgacaagcatgtttctcttaccaataaccagattataaactatgttagtaacaaggacaacacttggattgctgtcacgggtattgcccaagaagaaggacgtatcgtcggtcacatccaactgtactcaaaagccagaaatatttctcaagccatcgatggtcatgtttgtaattttgctactcttaaattgagcggtgcctccgttgacacacaagttttcgtttgtggtaatcgcactgccaccggtggtcaattgcatgtgattgagatagaccaccaagagggtgcaccagtctttcaaaagaagaacgtagatattttcttccctgccgatgctgccaatgacttccctgtctccgttcatgtctctcagaagtatggaatcatctacttgttgaccaaatatggatttattcacttgtacgacgtggagtcatctacctctctgttcgttaatagaatttctgccgaacccgtattcactgcagcttcttacaacaatggtaccggtatcatcgctattaacagatcaggacaggttttgactgtagatctgtccagagagagttttattccgtatattttgaataagttgtccaacattcctcttgctttgtctctagcatcaagatcgggattaccaggtgccgaaaatcttttcactcaacaatttaaccaatgtctggcttccggtgattatgataatgcagccaagattgctgcctccagtgagcaactcagaacatcggagactatcaatagattgaagaacttgcaaccggcaccaggtcagatttctccaatcttgtcttacttctcaattctgttggacaagggaactttaaacaagtttgaaagtatcgagctcgctaagcctgttcttcagcaagacaaaaagccactgttcgagaagtggctaaaggaggacaaattacaatcctccgaggaattgggggacatcgttaagccatttgataccactctagcacttgctgtatacatgagagctcaagttccagtgaaagtggtctcttgtctggctgagatcggtcaattcgacaaaattctgccatactgtgagaaggttaattaccaccccgaatacaccattttgatccaaaacattgtccgggtgaacccagacaaggctgctgagtttgctactagtttgctcagacagaccccaggtcttgatattgaaaagattgctgacatctttttgtcccaaaactatatccaacagggtaccgcctttctgctagacgccttaaaggatgacaaacctgctgaagggcacttgcagacaagattgttggaaattaacctgttgcacgcgccacaggttgcagacgctattttgggcaataatatgttctctcagtacgataggccaaccatcgctgctttggctgaaaaagctggtttattccaacgagctctggagcacttcgatgatatcaaggatattaagcgtgttattgtaaacactcaagctttcccgaccgactggttagttaactactttggaaaactgaacgtcgagcaatcggtagcatgcttgagagaaatgctgagcaagaacatcgctcaaaatttacaggttgttatacaggtcgctactaagtacagcgaccttattggtccagtaacgttgatcaaggtgttcgaggaatttaaatgtactgaaggagagtactactacttggcttccattgtaaacgttactcaagagccagaggttgtcttcaaatacatcgaagctgctgcaaaattaggtcaggtcaaggagatcgagcgagttactagagaaaacaacgtttacaatggggaaaaggttaagaacttcttgaaggaggctaagcttgatgatcagcttcctttgataatcgtttgtgatcgttacgatttcgtgcatgacttggtcttatacctgtataagaataagttctttaagtttatcgaggtgtacgttcagcaagtgaaccctagtaagacaccacaagttattgccggtctgctagatgtcgattgtgatgaagccattatccaatccctgcttcaaacggtcattggacaagttcctatcgctccactggttgaagaggtggaaaagcgtaatcgcctgaagttattgttgccattcttggaacaaactctgcaaggaggatccgctgacaagactgtctacgacaccttggcaaagatttacatcgactcgaacaacaaccctgaaaagttcttgcaagataacgacaattacgatacacttgtcgttggtaaatattgtgaaaagcgtgacccttatctggcatatatcgcctactcaaagggccaaaacgatgaggagctcatcaagattacaaacgaaaacgccatgttcaagtatcaagcacgttacttactttcaagaagtgataggcagttgtggagtgtcgtcctcagcgaagacaatatgtatagaagacagcttatcgatcaggtcgttggtactgctatacctgagttagaagatccagaacctgtttctctagccgttgaggcctttatggatgcagacttaccttccgaattgattgaacttttggaaaagatcattctcgaaccgtctccattcaacgacaacccatcgcttcaagagcttttaattctgaccgccatcaaagctgaccaaactagagtcgactcatacattgaaaaactagacgacttcgatcccgaggaaattggaagccttgctacagaggccggattgtatgaagaggctttcaaggtctataataagtttgagctttacggtaaggctctgaaagttctcgttgaggacgtcatgtcccttgatagaggagaagagtacgctgagaagctagacaagccagaactgtggtctcagttgggcgccgcacaacttaacggtttgcgtatcccagaggctatagaaagttatatcaaagctggtgacccttccaattttgaacaagttatcgacatcgctgagcatgctggtaaagaagaagagttgattccttttttgaaaatggctagagaaaccctgagagaaccaaaagtggacggagcgattattaacgcctatgccaacactgaccgattgaatgatattgagcatttcttgcagttatctaacgctgcagacttagaatcaattggggataaattgtacgagaagcataattacgaggcggctaagttgttgtactcttccatctcaaactactctaaactcgcctctaccttggtgtatctgggtgattatcaagccgcagtagattgtgccagaaaagctagcaacgtcaaggtttggaaacaagttaatgaggcttgtatagataataaagaatttagattagcccaaatttgtggactgaaccttatcatccacgctgaggagctagacgagttggttaacaaatacgagtacttcggttacttcgaccaattgctttctttgttcgagaacggtcttggtttggaacgtgctcatatgggcatgtttactgaattagccgtcctttacaccaaatattctccagacaaaactatggaacatttgaagttgttttggtctaggatcaacattcccaaagtcctaagggcatgcgaggctgcccacttatggccagaattaatttttctctattgccactacgacgagtgggataacgccgctcttactatcatcgagagatcgtcctcagcctttgaacattcttcttttaaggaggttattgtgaaggtgtctaatttggaaatttactacaaggctattaacttctatttaaatgagcacccttcattgctaaccgacttgttatccgtcatgattcctagaattgacttgcctagggtcgttaagttgttccagaaatcggacaacttacctttggtcaagccattcctaatctccgttctagataagaacaactctattgttaaccaggcctaccacgatctgcttattgaggaagaagattacaagtcattgagaagtgtgattgaatctaacgataagttcgacgcgttgggcttggctgagagattggagaagcacgaagtgattttcttcagacagattgcagcagtcttgtatcgtaaaaataagaagtggaacaaggctatctccattttgaagaccgatagactatggtcagatgtaatagagacagctgccatttctggatccgaaaaagttgcttccgagaccctgcagtatttcgttgaaaccggaaataaggaatgcttcgtggccacgctgtacgcctgctatcatctggtcaaccctgactccatattagagttgtcttggttgcatggcttgggtgactacactaagccctatgagatttctatagctaagaacaatcaggatagaatcaacgaactttacaaagacctgaagaagagacaatcacaagaaacaaacgctgatgatgaacaggcaggttcccaacgtctgctcttgacgaacggtactggtattggtcttcaacccactggtaccggctttggtggtttctaa

SEQ ID NO: 3620 - DNA, 513 bp, Artificial Sequence
  Optimized genes for Pichia pastoris
atgagcagaaattttcagactgtcaaaagaggtgaccgtttcccaactgatgcgaccatgttccatatcccatcctcgggcggtggaccagctcccttcaacctgagagagacagtgcaaggaaagcgttttattgtcgtcgctgctccaggtgcctttacgtctacctgtcacgaggaacaccttccgccttacattaagaaccttcctacatttttgaagaagggtattgatttcattttggttatcactgctaacgacgcatttgtcttaaattcatggaagaaagctctcggtgctgacagtgataagatcatattcgcctccgacaccaatttggaattggccaacaagctgggcttaactctggacttgtctgtagcaggtctaggacagaggactggtagattcgcattgatcgttggaaaggatggggttgtgcaaaacgttttcgccgagaaaggtcctgaagttaaacattcatctgccgatagagttttggctaagctttaa

SEQ ID NO: 3621 - DNA, 942 bp, Artificial Sequence
  Optimized genes for Pichia pastoris
atgcaccgaacatattccctcagaaacagtagagccccaactgcatctcaaatcaattccccagctcctccaccgtcatcaacaaagcaaaaccgtttttttggtaagggatcgctttcaaatactcttagaagacagactgctggctctttcggcccagagctgtctaaaaagctggcccagctagtaaagatggagaagaacgtcatgagagccatcgaatctagctcctacgaaagaaaggctgtggctaagcaattatctttgtggggtgccgagaacgatgacgacgttagtgatattactgataagttgggagttttaatttacgagattggtgaattagacgatcagtttattgatagatacgaccaatatagaatcaccctcaagggaatcagggacattgagggtagcgtccaaccttcgagagacagaaaattgaaaattaccgatcaaattgcttatttgaaatacaaagatccacaatctcctaagattgtcgttctagagcaggaattggtacgtgctgaagctgaatctttagttgctgaggctcaattgtccaacattacccgcgaaaaattgaaagctgccttcaactaccacttcgattctactagagagcattctgaaaagcttgccctgatcgctggatatggtaaggccctactggagcttcttgacgatagtcccgttacccctggtgaaacacgtcctgcttacgacggatacgagtcctcaaagcagataattatcgacgcggaaaatgcattggcctcctggactttggaaggtgcagctgttcgtccaaccctgtccatcaggcacgtcgagggtgagtacgacgatgaagacgttgagggtttgaatgaggatactgataacttgcatttgacggaagaggaatggcaaaaggaacagcaagtgcaaaacgcataa

SEQ ID NO: 3622 - DNA, 1614 bp, Artificial Sequence
  Optimized genes for Pichia pastoris
atgtcatctactgatatccagggagaccaaggcgataatgaaaagatttacgccatcgaatcatctccaagcaacgaacagatcaaagatattcacgaggcccccgccgataataagtcagagctggacattccagtcaagcctaaaggtagttacattttggtctctgttctttgtttgcttgtggcattcggaggatttgtctttggatgggacacaggtaccatctctggttttgttaacatgagtgacttcacccgcagattcggtcaatttaacggagaaacttattacctgtccaaggtaagagttggtttgattgtctccatttttaatattggttgtgctatcggtggagttaccttggggaagctaggtgatatctggggtagaaagaaggctttgatgttcgtaatggttatctacatggttggtattctgattcaaattgcttctatcgataagtggtaccaatatttcattggccgtatcattgctggtctggctgtgggagctgtatctgtcttgtctcctatgttcatttccgaaacttcacctaagcatataagaggttcgttagttagttgttaccagctaatgattactgccggtatcttccttggatattgcactacatatggtaccaaaacttacaccgattccactcagtggagagtgccattaggactgtgtttcgcttgggctatcttgatgatcgttggtatgactttcatgccagagtctcctcgttttttggttgaagttaacagggttgacgaggctatgaagtccatcgctagagttaataaagtctcgatcgacgacccatctgtttacaacgagatgagacttatttcagacggtatcgagaaggagaaggaagcaggttcagtgtcctggggtgagttatttaccggtaagccaaagatattttatcgtttgttgattggtatctttatgcaatccttacaacaactgactgggaacaactatttcttctattacggtactaccatctttaaggctgtcggcctcgacgattctttccagacctccattattctcggagttgtgaactttgcatctacttttcttggtatttatacaatggataaattcggccgtagaaggaccctattgggtggttcaggagcaatggtggtctgtctggttattttttcttcggttggagtaaagagtctttacgagaatggtaaagatgacccaagcaaaccagctggaaatgccatgattgtcttcacatgcttattcatctttttcttcgcttgtacctgggccccgggcgtatttgttgttgtcagcgaaacgtaccctttgcgaattagatctaagggaatggctatcgcccaaggttctaactggttgtggggttttttgattgctttcttcactcccttcatatctggtgcgattgattttgcatacggttacgtttttatgggatgcactttgttcgcctttttcttcgtctacttcttcgtccctgagacgaagggattgtcccttgaagacgtggacgaagtctacgagaacttgacatttggtagagcctacgcttattcccacactataaaagataaaggggccctctaa

SEQ ID NO: 3623 - DNA, 408 bp, Artificial Sequence
  Optimized genes for Pichia pastoris
atgcaattctctattgtcgccactctagctttggccggatcagctttagccgcttactccaacgttacctacacatatgagactacaatcactgacgtagttaccgagttgaccacctactgtccagaaccaacgacgtttgtccataaaaataagactataactgttacagctcctactaccctgaccatcactgattgcccatgtaccattagcaaaaccacaaagatcactactgatgttcctccgacaactcactcaactccacatactactaccactcacgtcccaagtacctctacccctgctcccacacattccgtgtctactatttcgcacggaggtgcagctaaggcaggtgttgccggtttggctggcgtggctgctgcagccgcgtatttcctttaa

SEQ ID NO: 3624 - DNA, 792 bp, Artificial Sequence
  Optimized genes for Pichia pastoris
atgtcccaagccccagctagcgcccaacaaggatctgctcctcaaggtcagaggcagttcggaggtgctcgcggtggtagaagaggccccaaacgtggtccaaggagaggggaagaggaaaagggctggactcctgtcactaagttgggacgtttggttaaggcaggtaagatcacatctatcgaagagatctatctgcattctctccctgtcaaggaatttcaaatcattgaccatttgttgcctgatttaaaggacgaagttatgaagattaaacccgtccaaaagcaaactagtgctggtcagagaactagattcaaggccgtggtggttatcggtgattcaaacggacacgtggggcttggtatcaagaccgccaaggaggttgcaacggctattagagctgccatcatcattgcaaaactttctataattccagtaagacgtggttactggggatcaaacctgggagcgccgcactcgttagcttctaaaactagtggaaaatgtggttctgttttagttagaattattccagccccaagaggatcgggtattgtcgcatcacctgccgtaaaaaaaatgatgcagctagccggtgtcgaggacgtttatacatcttccggcggttccactagaacccttgagaatacactgaaggctgctttcattgctataggtaacacctacggttttttgaccccaaccttgtgggacgattatgagttgtcagaatctccactagatgtttacgctgatgaggcttccgcttcctaccgtaagcgatactaa

SEQ ID NO: 3625 - DNA, 513 bp, Artificial Sequence
  Optimized genes for Pichia pastoris
atggttcaagttggtgataaatttcctacagatgttgccttgacatacatcccatggactccagagaactctggtgttctggcttgtgctatccccattccatatgacctgtctaagaagctcccgggccgtaccgttgttatagtgtcagctcctggtgctttcactccaacttgcactgccaaccacattcctgtttttattgaaaagattgatgaatttaagaagaagggtgtggatgacgtcgtcgtaattaccaccgatactcctttcgccaatgctgcttggggaaaagctctaggtgcgaaggacgagatcatttttgcaaacgatccacttgctgccttgagtaaagaattgggttatcttaaatccgaggtcccagcctcgttcggaatcagaggagcaagatacgccgtcgttgtcaaggacggtgtggtctcatacttcggggtagagaccagctctggtgttacggtctccggagctgacgcagttttagaagctttgtaa

SEQ ID NO: 3626 - DNA, 972 bp, Artificial Sequence
  Optimized genes for Pichia pastoris
atgacccttactattaatccctcacttaagaatgtgcttgagaaccaaaagggtggcgctcctgtcgaaaacgatttgaaagctttaagaaagcatgcagataaaattgaagagcattactataaagaagtcattaccaagccatctgacgttgccggtatgcaattcactataactgctcacgatggtgaccaaattgagtgccgattctatagcaaagatgctgaccctaaccaagttagaacatctaaattgccttgtattattcatttccacgggggtggttacatcacgggtgacgtctctagatattcccaccttacttctcagtatgtttctgccaccggagtcccagtgctgtctgtagattaccgtttggccccagagtacccagcgcctatcccacaggaagacggtttctcagctttgcaatacctgtacgaacactgtgacaatttgatgatcgatcctaataaaataattttgatgggcgactcgtctggagccggactagctctctccgttgccgcccttgctgctgaacgtggtattcccatcgcaaagcaaattttgatctacccaatgctggacagtaataacaccgaagagccagactccgaagatttgaaggagaagaagccgtacctgacttggactcacaggatgaataagctcgcttttgatagtttgttatccgagaaggaggagtacgagccatccttattcccttttaatgatcctaacgttgactggtcaaagtttccaaagacttatctagagaccgtcaccgttgatatcctgaacgatgatggtagacagttgcatagaaacctgacagagaacaacgttcaagtggaatttcatgaatgggaaggattgtgtcacggattcgagccattgctttggacagaggaaaacgacctattgcagaacatcttggaaaagagataccaggcaatcttagacgtataa

SEQ ID NO: 3627 - DNA, 735 bp, Artificial Sequence
  Optimized genes for Pichia pastoris
atgcctcaaaagactacatctaaatacctcctaatgatcccaatttttaacagactagcattcggtcaatgctgtcgcttcgtgaaccatctttcaggattgaaattggacgaagaaaaaaaggctattataagcgagcgtaccgctaagtattacgaggagtacgaagaggctgcccgtgttttggaaaaggccaagtccgacgccgccgcatctggctcttacttcgtcgaggccgagccaaacttggtactggttgttcgtatcaaaggtattaacaagattgctcccaagccaaggaaagttctgcaattgcttagactgctgcagattaatgctgctgtcttcgtgagaatcacgaaggctactgcggaattgttacgtttggtcgaaccttacgtggcatatggatacccatcacttgaaactgttagagagttaatttataaacgaggttacggcaagttgaacaagcagagggttcctttgaccgataatgacatcatcgagaaggttttgggtcagtacggtatcatctcgattgaggatcttatccatgaaatttacactgttgggccaaattttaagcaagctaataacttcttatatcctttcagactctccaacccggatggtggttggggtgtcagaagaaaattttttcactatattcaaggaggagctacaggtaacagagaagagcacataaatagtttggtaaagaagatgaactaa

SEQ ID NO: 3628 - DNA, 444 bp, Artificial Sequence
  Optimized genes for Pichia pastoris
atgtcactgtctaccttcaacgctgaggaagcagaaaacctggacgacatagagaagcagtttgctgttaaggctgttacccaagctgagacttactggaacttgttgacaaaaatccctggtactaaacttaagcttaccccatatgatgacgaaatctttgaggccttactaaaggatttccctgaattcgagaatcccgagtacgctagtaagattaatgaagatgagatgaagtctttgtccggcaaggaacgttggagaaagttcatgaaaccattcgaggaaaaaattgatgactttaactttggtactttgctcagaacggacagctctaaggagtacgatcaagaaggaactatcttcgtggtcagattgcaattttacgccatcgaaattgccagaaataaatatggtttaaacgattggatttcccagaagtaa

SEQ ID NO: 3629 - DNA, 1488 bp, Artificial Sequence
  Optimized genes for Pichia pastoris
atggaacagcctcaagctatggagaaggttgaatctgtagatgttacagaggctaatgccgtggcagcgggtaccaataaactcactaaaagaattgtcgccgcaggtttggggggaaagttaatgggtacaaagtctatggtggatgtaacagcagatcagctagcaaaggactctatcaatgagctgttggcccgagacaaggctttgaaggaaaaatacgagaagcaaaagcacatttctgaacaaccatggaccaaggacaactggcaccagcatattaactggttgaatatgatcctcgtttgcggattacctcttttcggtgctattgccacttattataagcctccaacaaaagaaacggttattcttggtgttgttttgtacattctgggtggtctctcaatcaccgctggataccatagattgtggtcccatagggcctacagtgctagaaccccactgaaggttctgttcgctctattcggtgccggtgctgttgagggatcaatcaaatggtggtcccactctcatagagtgcaccacagatacaccgacactcacagagatccttacgatgccagaaaaggtttctggtattcccatatgggttggatgctaactaagccgaaccctcgctataaggctcgtgctgacatcagcgatttggctgacgattggattgtgaggtttcagcacagacactacttattgatcatgacctttatggccttgattttgccaaccattatcgcgaaatatttttgggacgatgcatggggtggttttatttacggaggaatcttcaaggtcttcgttattcaacaagctactttttgtgtcaactctctggctcactggattggtgtccaacccttcgatgatcgtagaactccacgtgaccacttccttaccgctatcgtcacgtttggcgagggatatcataacttccaccacgaatttccttctgattaccgtaacgcattaaagtggtaccaatacgatccaactaagatagtcatctacttgtccagtaaagtaggtttgtcatacaaccttaaaactttctccgacaacgctattaagcaaggtctggttcagcaacagcaaaagaaattagacagcatgagagctcatcttaattggggtactcccttgcaggacttgccagtctgggataagtcggagtttttcgagaaatccaaggacaagaagggcttggttataatttctggaatcgtccataacgtggagaactttattggtgaacatccaggcggcgaaaagcttgttaaaggagctttagggaaggacgcaaccactgctttcaacggtggagtttatgcccatagtaatgccgcacacaacttgttggctactatgagagttgctgtcatcagagatggtaatgccaacgccaacactttttctctgcaaaacgaattccttgacaagaaggctgccgctgccgccgcttcaaattaa

SEQ ID NO: 3630 - DNA, 1626 bp, Artificial Sequence
  Optimized genes for Pichia pastoris
atgtccgaaaagtattcgagaccagcccagccacctcccacgtacaatcaaccaggtggtggtcaatctccttttaatgagccgtactaccctcagcagggagttaactcgtccgactaccaccaacagcaaagacctgactacgacccagagtcccaattcccaccagaaaagatcgttggttccggaaagcccgacaacgcagagacattcgatgatagtttcaaggttaaaaacaagttaaatgattggccctttaccatcttgttcatcgccactttggcaggattcgttgttgttgctggtatcgtcctttctgcctgggcctccaactacagcacatccggatctggtatttacgactctggagcgagttttaccctgaacactaacacggttgtcctgtttgctttcgtcatcgttatttcattggttttggccgttctgatgttgtgtttcgcacgtatcgccccaaaaagattcatccaagttggtattgtccttaacgtcgtcctaggcttggcctctagtatatactatctagccgttggttattactccgctggtgtcgtatttctagtttttactctaatctcagcttactgctactggtccatgaggggcagaatcccattttctgccaccgtgttgaccatcgttattgatgtaatgaagagaaacccttccactctcatgacctctcttattggtattatcgtgtctggtgcttttgctgctcttttttccgctactgtcgtggctacttacatgaaatggactccatcggacgagaacgggaactgtagtttcaatgagggaagcacttcttgctcacgttcaaaagttattggaattttggttttcgttttctttgctggttattatattactgaagtcattggaaatgtaatacacgtcaccatttcaggtgtttacggttcatggtattacttgtctagatccgatcaaggtatgcctagattccctgctttaggtgctttcaaaagagctatgacatggtcgtttggttctatctgctttggctctttgatcgtcgccctgctgcaactcctgaagaccattattcagattcttaagaacgacgctatgcaaaatggagagggttggcaaactattattttgtgttgtgcagactgtatcttgggattaattgaatgggctgttaggtactttaaccattacgcttacagttttgtggctttgtacggtgagagttatatgaagtcagcccgtgctacctgggatttattccgcgcaaagggattagacgcccttgtaaatgattgtctcataggggctggtttgtctttttttgctttgttcgtttcttatctgtccgcgcttttctcatatctgtacttgagatatactgctccaggctacaattcagatggttccttttatgcaccagtgattgctttcacattcgtgattgccttgcagattgtgaacatcgcaagctctgtcattagaagcggtacagctactttcttcgtctgtttagctagagatcctgaagtattccagatctcttaccctgacgaattttctcgaattttcgccgattatccacaagtcatgaacaaggttgccgcacgtcaataa

SEQ ID NO: 3631 - DNA, 447 bp, Artificial Sequence
  Optimized genes for Pichia pastoris
atgcaatttaagtctttgattggagctaccttggctttgagtgtggtcaaagccacgaccgagctggagccaatcttcaccaacgacgtcaacgttactgttccaacagttcctcctgagatcacctctacccccgatgtatccgtgccaggtaacctgactgaaacgggtggcctcactaacactactggaactggtggcttcaccaatactaccgcaaccggtactggtggtttcacaaatactactgctaccggtacaggtacaggtaccggtactggtaccggcactggtactgggaccggaactggtactggtaccggaactggtactggtacgggaacaggaacaactggaaccgggactgaaacaggtaatggagcccaggcagttctaggttcatctgtcttggctgctgccggactttttgttgctatgttaatttaa

SEQ ID NO: 3632 - DNA, 405 bp, Artificial Sequence
  Optimized genes for Pichia pastoris
atgtctaccgagaatcaagagatcaaagaacagattgatgcaaccaaccaagaaattgtcaacaacgctcaagaggctgcagagccagctacagaagcagtagctgaatcgagtacacaggcggaggccaccggtgaagttacctccgagcacgctaagtctttgaaggagaagactgaggaattcttggatcattcaaaaaaagaagttgaacacgcctttgaaactgccaaagagaaggccgacgaactggttaaaggtgctaaggccaaaaagacggaagctgctgaatctaatgccgaaacttccgaggctgctactgagagcgcagacaaggttgaggagaagggaattaagaagtactttactaagttcaagaacgtcatcaaaaaggtggccaattaa

SEQ ID NO: 3633 - DNA, 1005 bp, Artificial Sequence
  Optimized genes for Pichia pastoris
atgttgtctaccatcgctaagaggcaattttcgtcttctgccagtacagcatataaggttgctgttttgggagccgctggtggtattggtcaaccactgagtttgcttatgaagttgaaccacaaggttactgaccttgccctttacgatattagactggctccgggtgtcgctgcagatgtgagccacattcctactaactccactgtcacggggtatacccccgaagacaacggtcttgagaaaactctgaccggtgctgacctagttattatcccagccggtgtgcctcgtaagcctggaatgactagagacgatttgttcaatacgaacgcctccatcgtcagagacctagctaaggctgtcggcgattactctccatccgcagctgtcgccatcatttcaaaccctgttaattcaaccgttcctattgtggctgaggtcctgaagagcaagggggtttacaatccaaagaaattatttggcgtgacaactctcgatgtacttagagcttctcgtttcttgtcccaggtacagggtacaaatccagcatccgagccagttaccgttgttggaggccattctggtgtgacaattgttcccttgttgtctcaatccaaacacaaggatttgccaaaggacacttacgatgctttggtacatagaatacagttcggtggtgacgaggttgttaaagctaaagacggtgccggttcggccactttgtcaatggctcaagcaggtgccagatttgcatcctcagtcctgaatggattggccggagaaaacgatgttgtcgagccttcttttgtagactctccactcttcaaagatgaaggtatcgagtttttcagttctaaagtcaccttaggaccagagggagttaaaaccattcatggtttaggagaattatcagctgctgaagaggaaatgattaccactgcgaaggaaactctagccaagaacatcgctaagggtcaagaattcgtcaagcaaaacccttaa

SEQ ID NO: 3634 - DNA, 1341 bp, Artificial Sequence
  Optimized genes for Pichia pastoris
atgtcagacaatgctaatgaaacttcatcatccctattagacaacgtctacctggatagttccgacctactgatcgctcgttacgataaatggattctggctctggccttctttgagaacttttttgccagatacgactctattttgtcttctaccgcgaaggattacggaaagttggtgaagcattttagtaccgatacactccctcagttcgaggtttccccatcgtctaacattgcaggtgccgtctatggttcggttaactcagaggctgatccaaataaaaacgttacaggtgttaactccttcatagagcttttgaagttcaggagctcagaggatcaaggaaagattgctggcttggaaacttctatcagggaacaaataattccagagtttaaaaaatattccgctgatctttcagctaagaagaaggacctgaccgctgatgcttctaaacagcgtaaggagttaaagaaattgggtttgcatttgtcatcttccatctcgaaattgcagcattctacgcaggttttcgaatccgccagtggaacaggtaaaatggactacaaaaacgacccatacatgttgaaacgcgctgtaagtttgcacggtactgaacttatcgctaaagaacacaatcacatggacttcctaaagagagaagaactatccttgatgaccttggaaaagcgtacactggaattcatccaacttatttttgcagatgtttctaatagaattaccgccgccgattctgtattctccagatcttttgactctctttctaagactctttcctctattgatttagagtatgagtggaaacaattcagcgaggttaacaagcagagattagttaccgttgaaggtaacgacgatatctctggggccaatatctctgcagataacaagaagagaggtttgtccgacctcagctttcctaatgaccatcacccagcaactgaaccgatcttggagggaattttgcaaagaaaggagggcaaggtgaataagaagtacgtcagtgagtactacgttattaccaagacaagatatctctacgagttcgaatctaacgctccaaagaattcaacgcaacctaacactgtcctgtatctgcctgaatgtaccttgaagtccttaaacggtcccgacaactctaagttcaaaattgagatctcaggaaaggatgctactcaagccttttccgtcatcaagagcactttgattttaaagactagtacttatgatgaaatgcgtacctggttcaacgtcttgtctgaggtgtctggtttgatgcaaactcaagaagagtcgcgacttgactcccctaactaa

SEQ ID NO: 3635 - DNA, 1515 bp, Artificial Sequence
  Optimized genes for Pichia pastoris
atgactgataccaaggccgtcgaattcgtcggacacactgctatcgttgttttcggtgcctccggagatcttgcaaagaaaaagacctttcctgccctgttcgggctgtacagagaaggttacttgtcgaataaggttaagattatcggttacgcaagatcaaagttggatgataaggagttcaaagacagaatcgtcggttatttcaagacaaagaacaaaggggatgaggacaaggttcaggagtttttgaagctatgcagctacatctccgctccatacgacaaaccagatggatacgaaaaattgaacgaaactattaacgaattcgagaaagaaaacaacgttgagcaatcacaccgtttgttctatttggctctgcctccaagtgttttcatcccggtcgctactgaggtaaagaagtacgtacatccaggatctaaaggaattgctcgtattatagtcgagaagccatttggtcacgacttgcaatctgctgaggagctccttaacgccttaaaaccaatttggaaggaggaggaattattcagaattgaccattacttgggtaaagaaatggtcaagaacctgctagcttttagattcggtaacgcttttatcaatgcaagttgggataacagacatatcagctgtatacaaatttcctttaaggaacctttcggtactgagggtagaggaggatatttcgactcaattggtatcatcagagatgttattcaaaaccacctccttcaagtgctgactcttttgactatggaaagaccagtgtctaatgacccagaagccgttcgagatgagaaggtgagaattttaaagtccatctctgagttggatttaaatgatgtgctagttggtcagtacggcaagtctgaagacggtaagaagccagcttatgtcgacgatgagaccgttaagcctggttctaagtgtgtaacctttgctgctattggactacatatcaacacagagagatgggagggtgttccaattattcttcgcgccggtaaggctcttaatgagggtaaagtcgaaatccgtgtccagtacaagcagtccactggcttcttaaatgatattcaaaggaacgaattggtaattagggttcagcctaatgaagctatgtacatgaaactgaactctaaggttcctggtgtctcgcagaaaacaactgttaccgaattagacttgacctacaaggatcgttatgagaatttctacataccagaagcttatgaatctctcatccgtgatgccatgaagggcgaccactcaaacttcgttagagacgacgaattgattcaatcctggaaaatttttacgcccttgctgtatcacttggagggtcctgacgcgcctgcccccgagatctatccatacggttccagaggacctgcaagtttgacaaaatttcttcaagaccacgattacttttttgaatctagagataactatcaatggccagtgaccagacccgacgttttgcataagatgtaa

SEQ ID NO: 3636 - DNA, 1083 bp, Artificial Sequence
  Optimized genes for Pichia pastoris
atgtctgtcatgaaagctctcgtttacggcggtaaaaatgtgttcgcttggaagaacttccccaagcctactatactgcaccctaccgacgtcatcgttaaaaccgttgccaccactatttgtgggacagatttgcacattttaaagggtgacgttcccgaagttaagcctgaaacggttttgggtcatgaggccattggtgtggtagaatcgatcggtgacaacgttaagaacttttcaattggagacaaggtcctggtaagttgtattacttcgtgtggatcctgctattattgcaaaaggaatttgcagtctcattgtaagactggtggatggaagttgggtcatgacttaaatggaacccaagctgaatttgttcgtatcccatacggcgatttttccttacacagaattcctcacgaagctgatgagaaggcagttctcatgctgtctgacatcttgcctaccgcatacgaagtcggtgttctagctggtaacgtccaaaagggtgactctgtcgctattgtgggtgcaggtccagttggattggctgcccttcttacagttaaagctttcgagccatccgagatcattatgatcgataccaacgacgagcgtttgtccgcttctctaaagcttggagcaactaaagccgtcaacccaaccaaggtgtcttctgtcaaggatgctgtctacgatatcgtcaatgctactgttagagttaaagaaaacgatttggagccaggcgtagatgtcgctattgaatgtgttggagtgccagacactttcgccacctgtgaagagattatagcccctggtggtagaattgcaaacgtaggagttcatggtactaaagttgatttgcaattacaagatctttggatcaaaaacattgctattacaactggtctggtggcgacttactccactaaggatttgcttaagagagttagcgacaagtcattggatccaaccccgttggtcactcacgagttcaagttttcagagtttgagaaggcctatgaaacatctcagaatgccgctacgacaaaggctatcaagatcttcctgagtgccgactaa

SEQ ID NO: 3637 - DNA, 2475 bp, Artificial Sequence
  Optimized genes for Pichia pastoris
atgttgaaggccagaaccgtgaaacctaaccaactgagactgaacgccttaagagctaaggtcccacgaatcctgcttgcttcttctttgtccactctgtccttacgtacttcctcgaacactcttgctgttagacctgtccaaccaaaaattcctttcgctagacacaatgttaatcaccttagattacgaaccccgatgtcaatcagatttgcctcctcaggtggaccacaaatcaacatgaacgggcaacaagaagaggagttacccgccctgcagaagtacggtgttaacttgacacagttggctaaggatggaaagttggacccagtcattggcagagatgaggaaattagaaggaccatacaaattctttcccgcagaaccaaaaacaatccagctttgatcggtaatgctggcaccgggaaaacggccatcatggaaggactggcacaaagaatcataaagggtgaggtaccggagtctatgaaggacaaagaggtcgtggctttggacttaggcagcctgataagcggtgctaagttccgtggtgagttcgaggaacgtttaaaagccgtgttgaaagaactagatgaggcacatggtaacattatcctctttattgatgagctacatattttgttaggactgggtaaggctgagggatctattgatgcctctaaccttttgaagcctgcgctagctcgtggtcaattacaatgttgcggtgctactactattgaagaatatagaaaatacattgaaaaggatgctgctcttgccagaagattccaatctgtccttgtcaatgaaccatccgttcaggacgctatttctattttgaggggtttgaaggagaaatatgaaatccatcacggtgtccgtataacagattctgctttggtcaccgctgctgtttattccaatcgttacattacagacagattcttgcctgacaaggcgattgatcttgtagacgaggcttgttcagcactgagactgcagcacgaaagcaagccagacgtaattcaacagttggatagacaaattatgactatccaaattgagctagaatcattgcgtaaggagactgatccaatatccgtcgagaggagagacaagctggacgaacaattgaagctgaagaaagaagaactcgaaaggcttacacaggtgtgggaagatgaaaagaattctttggaaaagatcaagactgccaaagaagagcttgagcagtcgaagttggagttggaaagagctcaacgtgagggagatttcggaaaggctagtatgttacggtacagtaagatccccgagttggagcagaaagtttctgccacagcccaaagagtcaaggaaggtgaatcagagacgacaaccaatttgcttcatgaatctgttacctccgacgatatcgcctgggtcgtcagcaaaatgactggtgttcctgttcaatctcttatgaagggtgaaaaggataagctgttgtacatggaggagtctatcaagtctagagtcattggacaagatgaggcaatccactcggttgccgatgcagttagattgcagagagcaggattgactaacgagaaaagacccatcgcctcctttatgtttttgggtccaactggtaccggtaagactgagctaacaaagagtcttgccgagttcctgttcaacgacgaaaacgctgtcgttcgttttgacatgtcagaatttcaagagagacactcactgtccagacttattggtgctccaccttcgtacgttggatttgaggaaggtggtgagctgaccgaagctgttcgtagaaaaccatacgcagtggtgcttttcgacgagttcgagaaagcccacagagacatctctaagttgatgctacaaattttggatgaaggtaatttaactgactcacaaggccataagattgatttcaaaaatactattattattatgacttctaacttgggccaggatttgctattggctgataccgagctcgagaatgttggtggtaaggttagtgagaagactaaaaacgaggttattcaggttatgaagcagaactacccacctgaatttattaacagattggatgatgttttggtttttaaccgtttatcacgtgagtccttacgtaaaattgttgatatcaggttgtctgaagtgcaagatcgcctcgttgacagaaggattgaattgaagctcacggacgctgcaaaagaatggttaaccgaaaagggttacgaccctctctatggagcaagaccattgaaccgagttatcaagaaacagttgctaaacccactgagtattagattgatccagggagaaattactaacaattccactgtaaaggtcgacttggtggatggtgaccttcaaatcacctctgaaaagaacgaggccgaggctgaaaccgtaagaaaggaggacggagacgagcctgctgaatatgaaatcatcaaggactaa

SEQ ID NO: 3638 - DNA, 360 bp, Artificial Sequence
  Optimized genes for Pichia pastoris
atgcctaagaaaagagcttccaatggtagaaacaagaaaggtaggggacacgtgaaatttgttagatgcttgaactgtgctcgttgtgtcccaaaggataaggccatcaaaagagttaccatcagaaacatggttgaggctgctgccgtaagagatctgagtgaagcatccgtttacgaagagtacgctttaccaaagttgtataataagttgcactactgtgtgtcttgtgctattcatactcgcattgtcagagttagatctcgttcggaccgtagaattagagcacctccccaacgtcagaggttctcaaacgacagacgagtcaatccagctgaggccgctaagaaggccctttaa

SEQ ID NO: 3639 - DNA, 366 bp, Artificial Sequence
  Optimized genes for Pichia pastoris
atgtttcgtacagccgcctcttcaattggtagaagaggtttcaccactgtgaagggtgatccagctaaggctcaagcatttaaaaagcacttggatgatgtttatcaccactccaagggaactacggcattatggaagaagatctcttacttcgttgctttgcccgctattgctttgaccgctgtaaacacttactttgttgaggccgaacatgccgagcacagagctcataacaggcatctgagtgacgaagagtggcctaaagcttacccttatcagaacgttcgtagagtcgacttcttctggggcgacggagacaagacccttttttggaatccagatgtcaatagacatgtcaaagaataa

SEQ ID NO: 3640 - DNA, 597 bp, Artificial Sequence
  Optimized genes for Pichia pastoris
atgggtctactggatttggaacaacagttggctttttatagagcctaccattttaacaaagttaacgttgccatccacttggtctttgttcctaccatcttgttttcgactgtcggcttcttgtctgctatcccacttaaccaaattactccttttgacctctccggagttcctttctttggaaagttgtacaacttaggagcatttttgattgcttctttcagtatttactacatacttttggatagactagggctggtattgactccactgctgttgttaatctcatattctatttccacactgtatgacttctacgacaaaagcgaagttgtcaagggttcactagtgttgttcggtattggttgggctgttcaatttgttggtcacgccttattcgaacgtcgtgctccagccctgtttgacaatcttgttcaagctttagtcttggctccctacttcgtggccttcgaggtcgtgttcgctctcggattcagaaaggatcttcagaaaaagatgaataatcatgcaggtaagttgatgcttgagttcaggaccagagagaagggtcacccagtagtcgagaagactgattaa

SEQ ID NO: 3641 - DNA, 636 bp, Artificial Sequence
  Optimized genes for Pichia pastoris
atgtcattctccgatttttccaaggttgagactatctctgaattgaacgatcttttggcagacaagtcatatatagacggtacttcgccaacccaaatcgatgtcgtcgtttacaaagcgtttcaaaagcaggcccctaacttcgctagatggttcaatcatattgcctccttcactgacgaatttgataccctcccagagggtaatgccccagctgctgctgtggctgcagagttggcagaagaggaggaagacgtagatttctttggctctgacgatgaagaggaggatgaggctgccgaaaagctgaaacaagagagactggctgcctacgccgccaagaaggctgcaaagggtcccggtcctgctgctaagtctttagtcacacttgatgtaaaaccttgggacgacgaaactaatatgcaggatctgttggacaacgttaaggctattaaatgggacggtttggtctggggagctcacacgttcgttccagttggatttggaattaaaaaacttcaaattaacttagttgttgaggatgaaaaggtgtctctagctgatttgcagcaattgatcgaggaagatgaagaccacgtccaaagcaccgacattgccgctatgagtaagttgtaa

SEQ ID NO: 3642 - DNA, 399 bp, Artificial Sequence
  Optimized genes for Pichia pastoris
atggctcccaaggcagagaagaagcctgcctcaaaggctccagcagaaaaaaagcctaccgccggtaagaagacttcgtcttcatccgagccaaagaaaagatctaaagtccgtaaggagtcctacgcttcctatatttacaaagttttgaaacagactcatccagatactggaatctcccaaaaggcgatgtctatcatgaattcttttgttaacgacatcttcgaaaggattgccagtgaggcttccaagctggctagctataacaagaaatctaccatatctgccagagaaattcagactgcagtaagacttattttgccaggtgaattatctaagcacgccgtgagtgagggtacaagagctgtcacgaaatacacctcatctacacaagcttaa

SEQ ID NO: 3643 - DNA, 393 bp, Artificial Sequence
  Optimized genes for Pichia pastoris
atgtctgggggtaaaggaaaagccagcagtgctgagaaggcttcgacttctagatcctcaaaggctggattgacattccccgttggtagagtccatagattgttgagacgtggtaactacgcacaaagaattggttctggcgccccagtttacctcactgccgtcttggagtatttggccgctgagatactggaactggccggtaatgcagctcgtgacaacaagaagtctagaatcatccctaggcaccttcagctagcaattcgaaacgatgaggaacttaacaagttattgggacacgtgaccattgctcaaggtggtgtacttccaaatatccaatcagaattgctgcctaaaaaatccgcgaaggctaaggcttcccaggaattataa

SEQ ID NO: 3644 - DNA, 1002 bp, Artificial Sequence
  Optimized genes for Pichia pastoris
atggctatcacggtcggtattaacggctttggtcgaattggaaggttggttttaagagttgctctatctagagctgacatcaaagtcgttgccattaatgatccattcatcgcccctgaatatgctgcttacatgttcaagtacgattcgactcacaaggcttacaagggtgaggtctcagcctccggtaacaaaataaatatcgatggtaacgaaattaccgttttccaagaacgtgatccagtaaacattccttgggggaaagcaggtgttgattacgttattgagtcaaccggtgttttcactactttggagggtgcacagaaacatatcgacgctggagccaaaaaggtcgtcatcactgctccctccaaggacgctccgatgttcgttgtgggtgttaacgaggagaagtacacttctgatttgaatatagtgtccaatgcatcttgtactactaattgcctggccccattggccaaggttgttaatgacacatttggtattgagagtggtttaatgaccacagtacattccatgaccgcgactcaaaaaaccgtggacggaccatcgcacaaagactggagaggtggtagaacagccagtggaaacattattcctagttctactggggctgcaaaggctgtaggaaaggtcatcccagagttaaacggcaagctaactggtcttgcttttagagtacctaccgtcgacgttagcgtcgtcgaccttactgtcaacttgaagaaggaaacgacctatgaagaaatcaagtctgttattaaggcagctagcgagggaaaactgaagggtgttttgggatacacagaagatgctgtcgtgtcttcagattttttgggcgacgaaagatcttctatttttgatgcttccgccggtatccaattgaccccatccttcgtgaagcttatttcttggtatgacaacgagtacggatattcaacacgtgttgtggatctcctgcagcacgttgctaaggcctaa

SEQ ID NO: 3645 - DNA, 1245 bp, Artificial Sequence
  Optimized genes for Pichia pastoris
atgaacttgtacctgatcacccttttgttcgcctcgttgtgctctgcgattaccttgcctaagcgtgacattatctgggattattcaagtgaaaagattatgggcgtcaacctgggaggatggctagtgttggaaccatacatcacacctagcttgtttgaggcattcggtgacgacgtcccagtggatgaatacagatacactgaaagactggggaaatctctcgctctcgacagactgcaacagcactggagcactttctacgatgaaaaggatttccaagatatagcagcctacggtttgaatttcgttagaattccaattggatactgggcctttcaattacttgacgatgatccttatgttcagggtcaggaagaatacttagacaaggcactagagtggtccagaaaacacgggttgaaagtttggattgaccttcacggtgctccaggatctcaaaatggattcgataactcaggcaagagagattcatgggattttcaaaacggtaacaacgttcaggtcaccttagatgtcctcaaatacatttctaagaagtacggtacgacagactattacgatgttgttattggtatccaacttttgaatgaaccccttggacctatattggacatggacaatttgcgccagttttatgctgacggttatgacctagttcgtgatgtcggtaacaatttcgttgtcattcacgatgccttctatcaagctccagaatattggggtgacgattttacttcggctgagggatactggaacgtcgttttagaccatcatcattaccaagtttttgacgctgacgagctgcaaagatccattgacgagcacatcgaggctgcttgtgattggggtagagatgcaaacaaggagtaccattggaatttgtgtggagagtggtctgccgctttgactgactgtactccatggttgaacggagtgggtaaaggcacccgatatgagggtcaacttgataattccccttggatcggttcctgtgagaactctcaggatccatctaagttgtcctcagaaaggatttgtgagtatagacgttacgtagaagcccaattggacgctttcctgcatggtaaatccgctggttttatcttttggtgcttcaagactgaagcttctttagagtgggattttaagagacttgtaaacgccggtatcatgccacagcctctggacgaccgtcaataccccaaccagtgtggtttctaa

SEQ ID NO: 3646 - DNA, 1053 bp, Artificial Sequence
  Optimized genes for Pichia pastoris
atgtcgcctactattccaacaactcagaaagccgtcattttcgagactaacggtggtcccctcgaatataaggacatacctgtgcctaaacccaagtcaaacgagcttttaatcaatgttaaatattctggagtttgtcacacagatttgcatgcctggaagggtgactggccgcttgataataagttgccactagttggaggacacgaaggtgctggagtggtcgtagcatatggagagaacgttactggctgggaaatcggtgactacgccggaatcaagtggcttaacggatcctgcttgaactgtgagtactgtatccagggtgctgagtcttcttgcgcaaaggctgatttatcgggattcacccacgacggcagcttccaacaatacgctaccgccgatgcaactcaagctgctagaattcctaaggaggcagatttggctgaggttgccccaatcctgtgtgccggtattaccgtctataaggctcttaaaactgctgacttgaggattggtcagtgggtcgctatcagtggcgctggtggaggtttaggctccttggctgttcaatacgcaaaggccctgggtttgcgtgtactagggatagatggtggtgcagacaaaggtgaatttgttaagtctttaggtgctgaggtgtttgtggattttaccaagaccaaggacgttgttgctgaagtgcaaaagttgactaacggtggaccacatggtgttattaacgttagtgtctctccacatgccattaatcaatccgttcaatacgtccgtacgttgggaaaggtcgtactcgtcggtttgccatcaggtgccgttgttaattcagacgtcttttggcacgttcttaaatccattgaaattaaaggatcttacgttggtaacagagaagactctgcggaagccattgatctgttcacaagaggtttggtcaaagcccctatcaagattatcggtctgtccgagctggctaaggtgtacgaacagatggaggctggggctatcattggtagatacgtagtcgatacctctaagtaa

SEQ ID NO: 3647 - DNA, 435 bp, Artificial Sequence
  Optimized genes for Pichia pastoris
atggcttcaaaaactgaaaacgtcacccttggtccacaagttcgcgatggttcccaagtctttggagttgctcgaatcttcgcaagcttcaatgatacgtttgtccacgttactgacttgtctggaaaagagaccattgccagagttactggtggtatgaaggtaaaggctgacagagatgagagttctccatacgccgccatgctggctgctcaggatgttgccgcgaaatgtaaggaggtggggattacagcagttcatgtgaagctaagggcaactggaggtacatcgactaagactcctggtcccggaggtcagtccgctttgagagctttagctagatctggtttgcgtatcggtagaattgaagacgttacccctgtcccatctgactccacccgtagaaagggcggacgtcgtggcagaagaagataa

SEQ ID NO: 3648 - DNA, 156 bp, Artificial Sequence
  Optimized genes for Pichia pastoris
atgccttctcttaaaaccttcaagactaaacaaaaattgggaaaggctcagaagcagaatagaccattgccacaatgggttcgtttaagaactaataacaagaacagatacaacgccaagaggagacactggaagcgtacaaagctgggtatttaa

SEQ ID NO: 3649 - DNA, 387 bp, Artificial Sequence
  Optimized genes for Pichia pastoris
atgcagatttttgtaaaaactcttaccggtaagaccatcactttggaagttgagtccagcgatacaattgataacgttaagtctaagattcaagataaggaaggcatccctccagaccaacaacgtttgatcttcgctggtaagcaattggaagacggaaggacgctgtcggactataacatacagaaggagagtactctacatttggtcttaagactcagaggaggtattatcgagccatctttaaaagttcttgcctcaaaatacaattgtgataagtccgtctgtagaaaatgttacgctagactgcccccaagagcaaccaactgtcgtaagcgaaaatgcggtcactctaatcagttgagacctaagaagaaattgaagtaa

SEQ ID NO: 3650 - DNA, 1647 bp, Artificial Sequence
  Optimized genes for Pichia pastoris
atgtcgaaggaatcaggtaaggtcttgcaggttaattattctgactcagaaacatctaatggcgaggaccaatatgttcataagattaaaccagttgaggacgaggatgatacctccatgatgatgtcattcgacaatcataagccaactattactatcattatccttactgtcatggccagcttctctggtttcatgttcggttttgatactggttacatttctagtgctttagtctccatcggtactgatttagacaacaaggtccttacttacggtgaaaaggagctgataacatctgctacgtctctaggtgctctcctatccgccatctcagctggtttgcttgccgatattatcggtagaaaaccggtgataatgggatccaaccttctattcgttgtcggatcagtcattcaatgtgccgctaacactgtttggactatgatcggcggaaggttcgttatgggttttggtgtcggaatcggctctttgattgctccattgtacattggtgagatggctcctagtagattcagaggtagactcgtgattattaacgttattgccattaccggaggacagttggttgcctacgccattggtgctggtttaactcacgtgcataacggttggcgtatcctggtgggtttgtctattatccctcctgtcattcagttgtttgtttttttcttcctgcccgaaaccccaagattccttataatgacaaacaaactggaaaaggctgcaaaggtaatcgggaagacgcacaatgagagtgacgaggagctgattcagaccaagattttggaaatacaaagtgctaacgctattatcccagggtcgaatccattccaaaaaacttggaacgcaattaaggaaattcatcgtgtcccttccaattttagagctttggtcattggttgtggattacagggtattcaacaattcaccggtttcaactcgctgatgtacttttctgctaccgtttttgagactattggtttcaaaaattccaccgctgtttccttgatcgtcgctggaactaacttcatttttactagcatcgcattttttgttatcgacagagtaggtcgcagacgtatcctcttgatcggtgttaccggaatgatcctttctttggttatgtgtgccgtagcttttcactttttagatattcactttagtggccacaacgcgatagtcgaaactaatggaatctcaggaaccggagtagctattatcgttggtatgattctttacgtggcatcttacgctttgggtattggaaacgttccctggcaacagtctgaactattcccacaatctgttcgtggggtgggatccgcctattgtactgccgttaattggtccggatctttggttattgcatctacattcttaaccatgttagagaacatcacaccaaccggtactttctccttctttgccggtctgtcatttgtgtccttgattttcgtctttttttgctatcctgaactgtctggcttgaagttggaggaaacccaagaaatccttacaggtggtttcaacatcaaggcaagcttgaagttggctaaacaacgaagaaacaagcaattggaggaccctgataagatcgtacataaagtcgttgatcaggtttaa

SEQ ID NO: 3651 - DNA, 531 bp, Artificial Sequence
  Optimized genes for Pichia pastoris
atgttgagaaggtatttttcttctaactccgctagaatggtgcaagtcggacagtccctccctaagaccactttgtttgtgaaggatccttcggaccaattcgagtccggctctatcgaaccaaacagcgttattgttaccgtcccagcagccttttccccaacttgttctgacacgcacgtaccaggttaccttaccagattaaaggatttgaagtctaagaatatcaatcatctttacgtcgttagtgtcaacgatcccttcgttacaaacgcttggaaaaagaccctgctaaaatcattctctattgataaaactgaagtcccggttacttttctggctgacccaaagggtgatttcattcacggtttggacttagacttcgactctgcagctgttttcggaaacaatcgtagtaagagatcagcccttataattggttcagatggaaaagtagctaaggattttgtggagcctgataacactggtttgaaggtctctgctgttgactccgttttgaaagccctgtaa

SEQ ID NO: 3652 - DNA, 504 bp, Artificial Sequence
  Optimized genes for Pichia pastoris
atgatcatttataaggatatcatatcgggcgatgaattactttccgacgcttacgacgtgaaagaggtaggtggagttgtctacgaggctgactgtcaaatggttaccgtcggatcaggtgacgtcgatatcggtgcaaatccatcagctgaagagggaggtgaggatttggaagatggagcacagactgtaaacaacgttgtctactcttttagactagccgaaactcagtttgacaagaagagcttcatggtttatattaagggttatatgaaacgtattagagcccatttgactgagaacgcccctgatcaagtcgaagctttcgagaaaggtgcttccgcctatgctaagaaaattctctcttcctttggagactgggatttctacaccggtgagagtatggacccagacggtatgatcgttctgttgaattacagagaagatggggtgacaccatacgtttctatttggaagcacggtgttaaggaagagaagatttaa

SEQ ID NO: 3653 - DNA, 837 bp, Artificial Sequence
  Optimized genes for Pichia pastoris
atgtttactagatccgtccgtaacagtttcgtgagggccggtcctattagattgggacctgtagtttctaaaagattgtattcacaggctcagaatggtggaattaatcacaagagaatcttaatcggattgggcttattggcgataggcaccacactttatggtactaccaaccctactaagacacccattgctttcgtcgaaccagcaacggagagagcattcaaagatggtgatgtatctgtaattttcgttctaggtgggccgggagctggtaagggtactcaatgcgccaaactggtctcaaactatggattcgttcatctatccgcaggtgacttgcttcgcgccgaacaaaagagagaaggttctaagtacggcgagatgattagccaatacattagagacggtttgattgttccacaggaagtcactatcgcccttttggagcaagctatgaaagagaactttgaaaagggaaaaacacgttttttaatcgacggttttccacgtaagatggatcaggctaagacctttgaagaaaaggtggccaaatcgaaggtcaccctgttctttgattgtccagagtccgttttgcttgagagactcctgaaacgaggtcaaactagtggtagagaagacgataacgctgaatccatcaagaaacgtttcaagaccttcgtcgagacctctatgccagttgtcgactacttcggaaagcagggtagggttctgaaggtttcttgtgatcaccctgttgaccaagtgtactctcaagttgtgtcagttttgaaggagaagggtatctttgctgataacgagactgagaataagtaa

SEQ ID NO: 3654 - DNA, 468 bp, Artificial Sequence
  Optimized genes for Pichia pastoris
atggctaccgagctaatagtccaatctgaaaaggcttttcaaaaacagcctcatattttcactaacccaaaagcaaaagctaacaaaagaacgaaacgatggcacaaggacgtcggtctgggtttcaagacccctaagagtgccatcgagggatcatacatcgacaagaagtgtccatttactggaaccgtctctattaggggtaagatcttgactggtacagtcatctccactaagatgcatcgtactattattattagaagagattatttgcactacgttcctaagtataatagatacgaaaagagacacaagaatgttgctgcccatgtatccccagcttttagagttaacgagggtgatttggttactgttggtcagtgccgtcccttaagcaaaacagttagattcaatgttcttaaagtgaccccagccgtgggagggaacaagaagttctctaagttttaa

SEQ ID NO: 3655 - DNA, 1026 bp, Artificial Sequence
  Optimized genes for Pichia pastoris
atgtctcattacacctacttgggtgattcaggcttgcaaatttccagagtcatagttggttgtatgagcttcggtagcaagaagtggaatgaatgggttatcgaagatgaagacaagatctttgagattctaaagcattgttatgataagggtattcgtactttcgataccgctgattcatattctaatggagagtcagaaagacttttaggtaagttcctgaaagtttacaacatcccacgtgaatctgttgtaatcttctctaaggtgttctttccactcggcgacaacgaaaagggttttaactacacaactagagctcaatttccacaacatgaattgattaacagacaaggtctttccagaaagcacataattgacggtgttagatctagtgtcgagagactgggaacctacattgacctgttacagattcatcgactggatccaaacgttcctccaaaggagatcatgagagctttgaacaacctggtcgagtcgaaccaagttagatatttgggtgcttccactatgaagacttggcagttcgttaacctacaaaacattgctgagcagaacggttggcacaaatttattagtatgcagaactattataatttgttgtacagggaggaggagcgtgaaatgaacgattactgcaaacacaatggggtaggtttgattccttggtctccaaatgcccgcggtattcttaccaggcctcttaaaacattgacaaccagagccactactgatgcagccattaagatggttggattggactcgctttccccggaatcagaggagatcatcaatagagtcgagaaattagcaagtaaaaagaatgtgtctatggccgtgatctccacggcttgggtcttgcacaagggatgtaatcctattatcggattctccaaaccttctagagtcgacgaagccctagaggctttggacttagaattgctgcccgaagatatccaatttctcgaagagccctaccgtgctaacaacgacttattcggataa

SEQ ID NO: 3656 - DNA, 5637 bp, Artificial Sequence
  Optimized genes for Pichia pastoris
atgtcttataacgatgacaagtactataaccaaggttacccgtctgaaggttatcatccttctgaggaggccctgcaatcgcaaggatattacgaccaaggtcaaggccaacaaccacacggtcttaaccaaggtggtctgccaccacatgagtattaccagtcctatgaccagcagtttgacggctaccaccaagaatacacttccgatcctaacctagttggacatcagggatactacgagcaaccaccgagaaccgctcaagaccctgaagccttctctgatttctcctacggaccaggcaacggtgctggtactccctatgatggttacggtgctcagtacactccatcgcaaatttcctacggtgacccaaggtcctccaacacatctacgccagtctatggtgcaggaccatatgaccagtctggtatggtggcattacctaccgacccctaccccgcttggaccgctgataaccaagcaccagttagcattgagcaaatcgaagacgtctttattgatctgactaataagttcggattccaacgtgactcaatgagaaacatgttcgactacttcatggtattgttagattctagatcatctagaatgtcgcccgctcaagcccttttgagtttgcatgctgactacattggtggtgaccacgccaattacaagaagtggtactttgccgctcaattggacctggacgatgaagtaggtttcagaaacatgaacctgggtaagttgtcccgtaaggctaggaaagccaaaaagaagtcaaaaaaggcaagaaaagtggtcgaggagcacgccgatgacactgaacgtactttgactgaattggagggagatagttcccttgaagctgctgactacagatggaacgctcgtatgaacgcttatgtgccacttgatagagtgagacatattgccctttacctccttttgtggggagaagccaatcaggttagattcacccctgagtgtctttgtttcatctataaatgcgcttccgactatttggagagcgatgcctgtcaacaaagggtcgagcctgttccagagggtgattatcttaaccgaatcattacaccactttacagattcattcgcagccaggtttacgaggtggataacggtagatacgttaagagagagaaggatcataacaaagttgtcggttacgacgacgttaatcaactattctggtaccctgagggtatcgccaagatcgttttcgaagacggttccagattggtcgacgtgccatctgaagagagatatatcagactcggtgaagtcctctgggaaaacgtattttttaaaacttacaaagaaattagatcttggcttcatttcattactaattttaacagaatctggattatacacgtttctttgttctggatgtatgctgcttacaattctccgaccctctacactaagcactacattcaaactcaaaacaaccaaccattagcatctagtcgttgggctgctgctgccttaggtggtactgtggcctgtgctatccagatcgctgccactatttgcgagtggttgtttgtgcctagaaagtgggctggcgcacaacacttgtccagaagattgattttcttgaccttgatccttgcttgtaacctggcccctgttgtcttcgtcttcgcttgggccggtttggaaacatattcccaagctgcatacattgtgtctatcgttgtgttcttcgtggctgtggcgactatcgtgtttttttctgtaatgcctcttggtggattgttcacctcctatatgaataaaagatcccgtcggtacgtcgcttctcaaaccttcactgcgtcttttgcacaattgaagggactagacatgtggatgtcttacttgttgtgggttgtcgttttcactgctaagaccttggagtcttatttctttctaatcttgtccttaagggatccaattagaaatttaagtatcatgaccatgaaccgatgtgttggagagcgttggttcggagacacattgtgcagagagcaagctagaattgttttgggcttgatgtacgttaccgatctttttttgttcttcttagatacttacatgtggtacattctatgcaactgtgttttttcagtaggaagatctttttatttaggtatctcaatcctaacaccctggagaaacatttttactagattgcctaagagaatttactcaaaagttttggctacaacagacatggaaatcaaatacaagcctaaggttttgatctctcaggtttggaacgccattgttattagtatgtatcgtgaacacttgcttgcaattgaccatgttcagaagcttttataccaccaagttccttcagaaattgaaggtaagcgtaccttaagagccccaactttttttgttagccaagatgataataattttgacaccgagtttttccctagagactcagaagctgaaagaaggatctcgttctttgcgcagtccctggccactcccattccagaacctttgccagtcgataacatgccgacattcacagttttcacgccacattactccgagaaaattctgttatctctgcgtgaaatcatcagagaagatgatcaattttcccgtgttaccttgctcgagtatttgaaacaacttcatcctatcgagtgggactgttttgtcaaggatactaagattttggccgaggaaacatccggtttcgacaatgataatcaagagaaaaacggaaataatttgaaatctcaaatcgatgatttaccattctactgtattggttttaaatctgccgcaccagaatacaccttaagaactcggatttgggcaagtcttagatctcaaactttgtacaggactgtttccggatttatgaattacgctcgtgctataaagttgttgtacagggtcgagaacccagagattgtccaaatgtttggatcaaatgctgagaatttggagaaggagcttgaacgtatggccagaaggaagttcaagtttgtggttgccatgcagagattgagtaaattcaaacccgaggaattggagaacgcagaatttttgctgagagcctatcctgacctgcagatcgcttacctggatgaggaaccacctttgaacgagggagaggaacctcgattgtattccgccctgattgacggtcactgtgagataatggagaacggaagaagacgtccaaagtttcgtgtccagctttcaggaaaccctatcctgggtgacggaaagagtgacaatcaaaatcactccatcattttcactcgaggtgaatatatccaattgatagatgccaaccaagataattacctagaagaatgtctgaagatccgctctgttctggctgaattcgaagagttaaatatcgaccacgtcaatccctacacccctggtttgaagtccgaattcgatggagtgaagcacccggttgctattgttggtgctcgtgaatacattttttcagttaactccggtgttctgggagacgttgctgctgggaaggagcagaccttcggtacgttgtttgcaagaactctcgctcagataggtggtaagctccactatggtcatccagattttctgaataatatttatatgaccactcgtgggggggtatctaaggctcaaaaaggattgcacttgaacgaggatatttacgctggtatgacagcaatgtgtaggggtggtcgcataaagcattgcgaatattatcagtgtgggaagggacgtgacttgggtttcggatctatcttaaattttactactaagattggtgctggaatgggagaacagatgctgtccagagagtattattacttgggcacgcagttgccacttgacagatttttgtcattctattacgcacatccaggattccacattaacaacctgttcattcagttatcactgcagatgttcatgctcactctggttaacttaaacagccttgctcacgagtcgatcatctgtcaatacaatagaaatattcctattacagatatcatgtatccagtcggttgctacaaccttatgcctacaattgactggattagaagatacacattgtctatcttcattgttttttttatttcgttcataccattggccgtccaagagctaatcgagagaggaatgtggaaggccgctcagagattttgtcgtcattttatttctttgtcccctatgttcgaagtcttcgtcgctcagatctactcttcttcgctggttaatgatctaaccgtcggaggcgctagatatatttctaccggtagaggtttcgctacagccagaatcccattttcagtcttatactccaggttcgccgacagtagtatttacatgggtgctagatcaatgttgctactcttattcggcactgtagctcactggcaaccagccctactttggttttgggcatctctatctgctctaatgttcagcccttttattttcaacccacatcagtttgcttggcaagactacttcattgattaccgagattttatcagatggttgtcgagaggtaatactagatggcacaggaactcttggattggttatgtaagactcagtcgtagtagaattaccggttttaagagaaagactataaacgacgagtctgagaaggcagccggcgatgcagcacgagcccatagaagtaacatattggtggctgatttcatccctagcgccatttacactgctggttgttttaccgcgtataccttcatgaacgctcaaaacggtgttgccaacgcaactgttgttaattctgtattgagaattgtcattgtctcgattgctccaatcgtcgttgatcttgccgttcttgggttctgtgctggattggcttgctgtgctgggcctatgctaggtctctgttgcaagaagacgggtgctgtaatggctggcgtcgcacatggaattgcggtcgtcatccacattatcgcttttattggtttatgggtccttgagggatttaacttcaccaaaactttgatgggtctggcagctatgatctacattcagcgcttgattttcaaattaatgaccctgaccatgctgacccgtgaattcaaaaacgaccactcaaacacctcattctggacgggtaagtggtatggttctggtttgggctggatggcctggactcagcctgctagagagttcgctgccaaggttattgagatgtctgaattcgcaggcgattttgttttaggtcacatcttgttattctgccaatttccattgctttgtgtcccactaatcgatagatggcattcaatgatgttgttttggctgaaaccatccagacagatccgtccaccaatttactctttgaagcaggctagacttcgtaagcgtatggtaagaaactacttgaccttgtactttttagtctttgccatattcgttgctattatcgccggacctgctgctgccgccggtcaggttaacgttgaagaacttactgagcacctgccagaattcgctgaaggtctgatccaaccaagacgtcaagataataacgatacaggtaacaacaacacttggggttggacttacaccccctcaacttcaagctggtccaccaaggcctaa

SEQ ID NO: 3657 - DNA, 1542 bp, Artificial Sequence
  Optimized genes for Pichia pastoris
atgattcgtagtacattgttgagaagatctattgtcacaccatgcagatacaaaagtacgaaggttaactttcaccgaccagacggtccaggttccaaggacgcagccgaacaagccgatgccactgctactatccttgctgattctttggacttccaaaagagaattagaccatccgagtctgcccccaataaattaacctggcttgatgctcttaatgaaaagaaacgccagttgtccgagggcaaaacaatttcttctttcgcttaccaaagtactaaaacaactgccgttggtgaaaagactagatctgagtcattctcttacctgactctgccttttaaggacgacgtatggctaagagattcttacatcaatgctgctggaagattgagggtcggtcaattattccaggaccttgatgctctggctggtagaatcgcctaccgtcattgtgctcctgcagagcctgtgaatgttactgcatcagtagacagaatctatatcgtaaaaaaagtcgacgacatcgaaaactataactttgttctgactggtgtcgtgacttggaccggcaggtcatctatggagatttcggttaaggggtatgcttttcccggtgattacccatctgagattaaggagaccaatctcagcgatgatgcagtttttctgaaagctgacttcactttcgttgctagaaacccagagactcataagtcctttccaattaaccacttgttaccaaccaacgaaagagaatggttggacttccgtcgtgccgagtctcataatgcacaaaagaagttgagagcaaaactcgagactttggataaggtcccacctacccagcaagaatctaacttgattcacaacttgtacattgcttctaaggccgtcgctaagttggatccagaacaaagctccaagttgatcttcatgaaggattcacaggtttccagcacattattcatgcaaccacaataccgaaacagacactcgtatatgattttcggtggatacttattacgtcagacctttgaattggcttattgcgctgccggagccttcagttgtgccccaccaagattcgtctcactagactcaactacctttaaggcccctgttcctgttggtgcagttcttttcatgaatgctcgggtttgttacaccgagcacatcaaagaggaaggagaaggagattccattccggtcctcgcttccttgttgaaggcttacgagcttcctcctgctaaccagatttcgcatgattcatccgagttcctgtctagacctggtactattattcaagtcaaggtggacacaaaaatccgtaacctagacagtgttgaagccatagaatccggttcttttatctattcttttttcgtgccaagagataccgagggagttagagataagcctggttattgttccgtcgtgccccaaacgtacgaagaaatgatgttgtatatagaaggtcgtaggagagcttttgacaccgctgagtacgctaaggcacttcatgaggcgaagaaggcctaa

SEQ ID NO: 3658 - DNA, 450 bp, Artificial Sequence
  Optimized genes for Pichia pastoris
atgccaactagattctcagccaccagaaagcacagaggtaacgtgtccgccggtaagggcagagtgggtaagcatcgtaaacaccctggtggacgtggtaaggccggtggtcagcaccatcatagaactaatatggataaataccatccaggatactttgggaaagttggcatgagacacttcaggcttcaacaagctagatactggcgtccagtcattaatattcaaaacctctggtctttaatccccgaagagaaacgagaagatgctttgaagaatagtagcgcatcttcagctgttgtcattgacacattggctaacggatatggtaaggttctgggtaagggatccctaccaaacatccctattatagtcaaggcaagatttgtctcgaaggaagccgagcagtctatcagagctgtaggtggagttgttgagttggttgcttaa

SEQ ID NO: 3659 - DNA, 1209 bp, Artificial Sequence
  Optimized genes for Pichia pastoris
atgtccaaacagactccatcgggtatgacttttatttctctggttgatgattccaacgattcacctgtaacccaatctacttcagcagacaaggacgagaagcacactgcagtttcccaagagcagatcaacgctgccggtaagaagcagaatcaggtcgacgatgaggaggaggaagagcagaaggaagagtacaagagatctttggaagaaattgaaattaaggatgctgcttattataagatgaccgaccctgtccttttgtacgacattcccgcccaggttaacagttccgatgagtacattaagtggtcacctaacattgtgcaaactagaatgctgttaaaccatcttcagattccttttgaggttcaatggttgacttacccccaaatcaagccaaccctacaaaaattaggtgtcaagccttgggattctgatccagagtacactttgccagctatatcatataaggggaccactgttatgggaagatctgagatcgaggagttcgtgaagcaaaacttcgatccactttctacaccaaactttaccgactatttcttggacattgaagacagaaagtttaatagggctatttccaattacagtgatcaaattttgatgggtaaattgtcttttccgttgctcgccttctctgaatcaattgttgttaaggacgagaatgacccagaatatttccaaagaacaaaaaatgagagattcggagttgactgtcaagctttggtgaaagacaaagaaaaaatccatgaaatggtcgaggcgatctgcaacgaacttccaggttttatggagttgtatgattacagcgaagccgagaatgccgatttgctgttccttaaagtcaacaagtacctgatgggtttccacatcactcgtgctgatctcataatcgcttcttacgtgttttggatcaagacggccgttaaggctggcatggaggagcattctttccacaattactggttcgatgcttggtacaaccgtatttccaaattattggactccccatttgacggttctaaagtcgaacaagaggctttagacgatctgaataagcgtatcgagggatcccaccaaaacagagtccgagaatcgggagaacaaatcgatgaaaacgacaagacagaaaacgtaaacgaactaaccgaacctgccagtagcaccgttgaacagcctccagcataa

SEQ ID NO: 3660 - DNA, 450 bp, Artificial Sequence
  Optimized genes for Pichia pastoris
atgtctgacaaacttagcgaggctcaaattagtgagtttaaagaagccttctctttgtttgaccaggatcaagatggtaagatcacctctaaggaattgggcatcgttatgagatcactaggtcaaacccctacggaatccgaactgaatgacctgattagggagattgactctaacaccgatggatccattgattttccagaattcttgactatgatggcacgtaagatgagagactcggactcccaggccgaaatattcgaagctttcagagtcttcgataaggatggtgatggtaagatcgataagggagagctcaaacacgttttgacatctattggagagaagttgactgaggaggaggttgacgagatgcttagagaagctgacactaacaatgacggtgtgattgatatcaaggaattttcaaacttattagtcaacaaataa

SEQ ID NO: 3661 - DNA, 1518 bp, Artificial Sequence
  Optimized genes for Pichia pastoris
atgtccacttcttccaaattaggttggctatccaagctcgacgtgtcttcaactcctgagagaaatcttagacgttcctctatcattggtaccattggccccaagaccaactcacccgaggttctggtatctttacgtcaggctggattgaacatcgtgagaatgaacttttctcacggatcttatgaataccaccaaagcgtcgttgacaatgctcgtaagtcagaggagatttaccctggaagacctcttgcaattgctttggatacaaaaggtcctgagattaggactggcactactaagggagagacggactacgccattccaatgggtcatgagatgatttttacgaccgatctgtctttcgccaaatcttccgacgataaggtcatgtttatcgattataagaacatcactaaggtaattgaaccagggaagattatttatgtcgacgatggtgttctaagttttgaagtgttggaagttgtagacgaaaataccttgaaggtaagaagtataaatgcaggtgctatctcttcacacaaaggtgtcaatttgccaaatacagatgttgacttaccagccctttctgaaaaggacaagcaagacttacgttttggtgttaaaaacaaagtcaacatggtgttcgcttctttcattagatgtgctaatgacattaaggaaatcagacacgtcctcggtgaagatggcaaacagatccaaattattgctaaaatcgagaatcaacaaggagtaaataacttcgacgaaatcttggaagtcacagatggagttatggttgccaggggtgatctgggtatagagatccctgctccgcaggttttcgttgttcaaaagcaactgatcgctaaatgtaacctggccggcaagccagttatttgtgctactcaaatgttggaatctatgacttacaacccaagaccaactagagctgaagtgtccgatgtcggtaacgcaatccttgatggggccgactgtgttatgttgtcgggtgagaccgctaagggtaactacccacatgaagccgttgctatgatgcatcacaccgcattgattgccgaaagtgcgattgcttacttgcctcactacaacgaaattaaggatttggctagaggtttgatcaacaccgttgagacaatagcaattgctgctgtctccgcccattttgagcaaaacgcaaaggccatcgtcgtcctttcaacctccggaactagcgcacgcatgatctctaagtatagacctaactgcccaatccttatggttacacgaaacgatgaggccgctagatactcgcatctatatagaggtgtttacccattcatctataaacaggaggttaacgacaattggcaacaggatgttgaagagagactgcagtacgccattaccgaggctataggtatgggaattttgaagaagggtgacgctattgtcgccgtgcaaggatggactaagggtttaggtcacactaacactatgcgtgtcgtgttcgcttaa

SEQ ID NO: 3662 - DNA, 2106 bp, Artificial Sequence
  Optimized genes for Pichia pastoris
atggtttttcaggttaacgttccagttggtgaagcacgtaaaggagagaccgcccctagacgttattacaaagtcaaagatgccgcagtcctcaagccttctgactgtaaccctaagactgaaactgtctacgattacttggtcgagatgtttgagagacatgaggataacaaggccatggcatggagagatttggtggatatacacaccgaaaaaaaaaaggtgaacaagatgattgacggagagttaaaaaatatcgagaaggaatggcagtattacgaattgtctgactataaatttatcacgtataaggaattgaagagtattatattcgaatacggacgtggtttggttgagcttggaattaaacctaatcaagaggagagattgcatatatacgctagcacttcacacaaatggttccagacctatctagctacccaaactcaaaacattcctatcgtgacggcctacgacacccttggagagtctggtcttacccacagcttggtgcaaactggttcagtagctatctttactaacaacgacttactgcacaccttgattaatccattgaagaaggccgtctcagttcgttttatcatccacactgagaagttggattcatctgataagagatacggtggtaagctttaccaagacgctcaagttgcgattgatgaaataaagagaacgcatcctgatattaagttcatcagttacgatgaaattgtcgccttgggacgaggatctaaattaaacgctattccgccaaaggctgacgacctgtcgtgtattatgtacacctctggttctaccgggaccccaaaaggagtcgttttgtcccacaggaatgtgttggctggtatcggaggcgcttccactttggtccctagatctctgatcaacggtaaggatcgtattattgcattcctgccccttgcacatatttttgaacttgtcttcgaattaatttcattgtggtggggaggatgtttaggttacgctaacgttaaaaccttgactgatgcttctattagaaactgccagtccgacttaaaggcctttaaaccaaccattatggtcggggtcgctgctgtgtgggagtcggtaagaaagggtatcctagaccaacttaataagtcgccttttttattgcagaaggttttctggggtgcttacaagtccaagcaagctatgaagtattgtcatattccaggtacctctatcatcgatgccgttatctttcgtaaggttaaggctgctacaggtggtgaaattaggttacttctgaatggcggtagcccaatttccgctgatactcaaagattcatcaccaacttgcttgcgccaatgctcttgggttacggtctgacagaaacagtagctaatacatgcattactgacattgacaatttcgagtttgatgtggctggtgctctgaccggtgccgttactgttaagctaatcgacgtgccagaagcaggctatttcgctaaaaacaaccaaggtgaagtactcattcagggtgcttgtgtcactaaagagtactataagaacgagcaggagactgcctccgtcttcgactatgaaaagggttggttctcaactggtgacatcggtgagtggacttcatctggccaactgaaggtcatcgatagaaagaaaaacctgattaagacacttaatggagaatacattgccttggagaagattgaatctgtatatagatccaactcctacattcacaacgtatgctgttacgctgatcaaaataagtccaaacccgttgcaattgctgttccaaacgagacaacattgagaaagctagcagttcaattaaagttggcctctgctgttgacgaagtcgacttggccaaagttgtccacgactccaagttgatctctaaggttcatcaatctcttctggagacagccaaacagcagggactaactggcatcgaattgattcaaggtgttgttatcctcgacgaggagtggactccacaaaacggattcgttactagtgcccagaagttgcagagaaagaaaatcctggaatctgtcaaggatcgcgttgatgaggtgtacagacaaaatagttaa

SEQ ID NO: 3663 - DNA, 774 bp, Artificial Sequence
  Optimized genes for Pichia pastoris
atgtccagggaggattccgtttacttggccaagttggccgagcaggctgaaagatacgaagaaatggtggagaatatgaagactgtcgcctcctcaggtttggaactgagtgttgaggagcgtaacttgctgtcagtcgcttataagaacgtgataggtgcaagacgagcttcttggagaatcgtatcttctatcgaacagaaggaagaagccaaaggcaaccaatctcaagtttccttaattagagaatacagatccaagattgagaccgaactggctaatatttgtgaagacattttgtcagttcttagcgaacatctaattccttcggcccgtaccggagagtctaaggtcttttatttcaagatgaagggtgattaccacagatacctcgcagaatttgctgttggagataagagaaaagaggctgctaatctgagcttggaggcttacaaatctgcttccgatgtcgcggttacagagttgcctccaacgcatcccatccgtttgggtcttgctttaaacttctctgttttctattacgagatcttgaactcaccagacagagcctgccacctagcaaagcaagcctttgatgacgccatcgcagagttagagaccttgtcagaagagtcttataaagacagtactcttattatgcaactcttaagagacaaccttacactgtggacttcggacatgtctgaaactggtcaggaggaatccagtaattctcaagataaaactgaggctgctccaaaggatgaggaataa

SEQ ID NO: 3664 - DNA, 2529 bp, Artificial Sequence
  Optimized genes for Pichia pastoris
atggtaaacttcaccgttgaccagatgagatccctgatggataaagtcacgaatgtccgtaatatgtctgtgattgcccacgttgatcacggaaaatctaccttgacagattcacttgttcagagggccggtatcatatcagctgctaaggctggagaagctagattcactgacactagaaaagacgaacaagagagggggattactatcaaaagcactgcgatctccttatactccgagatgggcgacgatgacgttaaggaaatcaaacaaaaaactgaaggcaactcctttcttataaacctgatcgacagtccaggtcatgttgatttcagctcagaagttaccgctgctctaagagttactgatggagcccttgtcgttgtggactgtgtggagggtgtttgcgtccagactgaaactgttttgagacaagcactgggtgagcgaattaagccagtcgtagtcatcaacaaggttgatcgtgctttgctcgagttgcaagtcacgaaggaagatctctatcaatctttcgccagaactgttgaatccgtaaacgtggttattgccacctataccgacaagacaataggtgataatcaagtttatcctgagcagggtaccgttgctttcggatctggtttgcacggatgggctttcaccgtgcgtcagtttgccactagatactctaaaaaattcggagttgatagaattaagatgatggagagattgtggggtgactcttacttcaaccctaagactaagaagtggaccaacaaggataaagatgctgctggtaagcctttagagagagcttttaatatgttcgtattggatccaatttttagactttttgctgcaatcatgaattttaagaaagatgagattccagtccttctagagaagttagagattaatctgaagcgtgaagaaaaagagctggaaggtaaagctcttttgaaagttgtcatgagaaagtttttgcccgctgcagacgccctattagaaatgattgtcctgcaccttccttcgccagtgaccgctcaggcttaccgggccgaaactctctacgagggtccttctgatgaccaattctgtattggtattcgtgagtgtgaccctaaggcagaacttatggtctatattagtaaaatggttcctactagtgacaagggacgcttctacgcttttggaagagtcttttccggcaccgtaaaatctggtcaaaaggttagaatccaaggccccaattacgtaccaggtaagaaagaggacctgttcatcaaggccgttcaaagaaccgtcctaatgatgggtcgaactgttgagccaattgacgacgttcctgccggtaacattttgggtattgtcggtattgatcagttcctcttgaagtcaggaactttgacaactaacgaagccgcacataatatgaaggtcatgaagttttcagtttctccagttgttcaagtggccgttgaggttaagaacgccaacgatttgcctaagctggtagagggattgaaaagactttctaagtctgatccatgtgttttaacctacatctccgaaagtggtgaacatattgtcgccggtactggagagttacacctagagatctgccttcaagacttgcaggatgaccacgctggggttccattgaagatttcgcctcctgtcgtgacataccgtgagaccgtcactaacgagtcttccatgacagccctgtcaaagtcgcaaaacaagcataaccgtatctatttgaaggctcaaccaattgatgaagagttgtcattggctatcgaagaaggtaaggttcatccgagagacgactttaaggcaagggctagaatcatggctgacgagtatggctgggatgtgaccgatgcgagaaagatttggtgttttggaccagatgggactggagccaacttggtagttgaccaaagtaaggcagttcagtatctacacgaaattaaggatagcgtcgtcgcaggattccaattagccacgaaggagggtccaatattgggtgagaacatgagatctgtgagagtgaatatcttagatgtaacattgcatgctgacgcaattcacagaggaggtggtcaggtcattccaacaatgaagagagttacctatgctgcttttctgttggctgaacctgctattcaagagccaattttcctggtcgaaatccaatgtccagaaaatgcaatcggaggaatttactccgttttaaacaaaaagaggggtcaggtgatctccgaagagcaaagaccaggcacccctctgtttacagtcaaggcctaccttcccgttaatgaatctttcggtttcactggtgagttgcgtcaggccactgctggtcaagcttttccacagatggttttcgaccattgggcaaacatgaacggtaacccgttggatcccgcttctaaagtgggtgagatcgttttggccgctagaaagcgtcaaggtatgaaagaaaatgtcccaggttacgaagaatactacgacaagttgtaa

SEQ ID NO: 3665 - DNA, 1578 bp, Artificial Sequence
  Optimized genes for Pichia pastoris
atgcttcgtacctcaccagctactaaaaaagcccttaagtctcagattaacgcctttaacgttgccgctttgagattttactcatctttgcctttacaagttcctattaccctgcctaacggtaagacatacaaccaaccgactggattgtttatcaacaacgagttcgttccctccaagcagggaaagacattcgcagtattaaatccttccaccgaagaggagatcacccatgtgtatgaaagccgcgaggatgatgttgaattagccgtcgcagcagctcaaaaagcctttgattctacctggtcgactcaagacccagccgaaaggggtaaggttttgaacaagcttgctgaccttatcgaagaacactccgagactttggctgctattgaatctttggataatggaaaggcgatcagttctgctagaggcgacgtcggtttggtcgtggcctaccttaaatcttgtgctggatgggccgacaaagtgttcgggcgagtcgttgaaactggttcttcccatttcaattacgttcgtagagagcccctgggtgtttgtggccaaatcattccatggaatttcccattactgatgtggtcctggaaggttggtcctgctctggctactgggaacaccgttgttttgaagactgctgagtctacacctttgtctgctttgtatgttagtcaattggtcaaggaagctggaattccagccggtgtacacaatatagtgtcaggtttcggtaagattactggtgaggctatcgcaacccacccaaagattaagaaagtcgccttcacgggaagtaccgccacgggtagacacataatgaaggctgctgctgaatccaacctgaaaaaagtcacattggagctgggtggtaagtcacctaacattgtcttcaacgacgctaacatcaaacaggctgttgctaatatcattttgggaatttactacaactctggtgaagtctgctgtgcaggttctcgtgtttacgttcaaagcggaatctatgatgagctattggccgagttcaaaaccgcagctgagaacgtgaaggtgggtaacccattcgatgaagatacttttcagggtgctcaaacttcccagcagcagctcgagaagattctaggcttcgtcgagagaggtaagaaggacggtgcaaccctaatcactggaggcggaagattaggcgacaagggttactttgtacagccaacaatctttggtgacgttaccccagagatggaaatcgttaaggaagagatttttggaccagttgtcactatttcgaaatttgatactattgacgaagtagtcgatctcgccaatgattctcaatatggacttgctgctggtatccattcagacgatataaacaaagtcattgatgtagccgcaagaattaagtctggtacagtgtgggttaacacttacaatgacttccaccaaatggttccattcggtggttttggtcaatccggaattggaagagagatgggtgtcgaagccttggaaaactatactcaatacaaggcgatcagagttaagattaatcataagaatgagtaa

SEQ ID NO: 3666 - DNA, 876 bp, Artificial Sequence
  Optimized genes for Pichia pastoris
atgtatagaaacctaattattgcaacagccctgacctgtggtgcttactcagcttacgttccttctgagccatggtctacattaactccggatgcttccttggaaagcgcattgaaggattacagccaaacttttggaattgcaatcaaatcattggacgccgacaagatcaagagagaggccgttagtcaaattggtgatggtcaaattcaagctgccaccattacttcgtccgagcctaaagtcaccgcccaggttgtctctcaaattggcgacggacaaatccaggcgacaacctctacttcatccaagagtaaggagactgctcaggttgtttctcaaataggagacgagactgctcaggtcgtctcccagattggtgacggacagatccaagccaccacttctacttcctctgaagtaaagcagactaccggcgttgtatctcaaatcggtgatggtcaaattcaggctactacagctaccacatccgttgcctcacaaataggtgacggacaagttcaagaatcaaagccaaccgataccagtgaggataaagggacatccgatttggtgtcctgcttaactgactcttctttggccttggtgcttgagaagggcgtcctcactgatgctcaaggtagaatcggtgctattgtcgctaatcgtcaattccagttcgatggaccacctccacaggctggtacgatctacgctggtggttggtctattactgacgacgctaagttggcacttggaaactctactaccttctatcaatgtttgtcgggtacgttttacaacctgtatgatgaaaaaatcggtgagcaatgtgaacccgttgaacttgatattgtggacctgatcgaatgttaa

SEQ ID NO: 3667 - DNA, 840 bp, Artificial Sequence
  Optimized genes for Pichia pastoris
atgtcattgtccctggataacatagtcccatcttttaggcttgatggaagcgttagtattgtcaccggtggttctggaggtctggcctctgtcatcacaaaagctttgttggcacaaggttcggaaatcgccgttgtcgacctaaatttggaaagaacgaaggaggccgcagagcttcttattgagtggggtaaggaaaacttggccaaggctaacggtggttccgttcctagagtcacttactgggcttgcaatgttgctgacgcagctaacgtcgaggaggtattcactaacgttaataaggagcatggcaaacttgctgagtacttagttcactgtgccggttactgtgaaaatttcccggctcatgagtatcctgcccgaaacgctgaaagtttggttcaggtaaacttgctgggttccttatatgtttcacagtccttcgctagaccattgattaaatcaggtcacagaaatggtagcattgttctggttggttctatgtcaggtaccattgtgaatgatccacaaccacaagtcgcctacaatatgtctaaagctggagttattcacttggcgagatctttagcttgtgaatgggctccctacaacatccgtgtcaacactttgagtccaggatacatcttaactcctctaactagaaacgtgatctccggacacacagagatgaaggactcttgggaatccaaggtgccaatgaagcgtctggcagaacctaacgaatttgttggatctgtgctttacttgctctcgaagactggttcctcttataccaccggacataacctcgtagttgatgggggctatgagtgttggtaa

SEQ ID NO: 3668 - DNA, 1461 bp, Artificial Sequence
  Optimized genes for Pichia pastoris
atgcttaaattcggacaacgccgattcttgtccacctccagaattctggctcaagctattaaacatgacgtcgtagtaatcggtggtggtcctggaggttacgttgctgccattaaggccgctcagttaggattggacacagcctgtattgaaaagcgtggtgctctgggtggaacttgcttgaatgttggctgtatcccaagcaagtccttgttgaacaactctcacttgtaccacaccattaaacatgacaccaaggaaagggggatcaatgttgctgacgttcaaatcgatataggacaactgcaaaacgccaaggaaaagtctgtgaaacaattgaccggtggtatcgagatgctgtttaagaagaatggtgttaagtactacaagggttctggttctttcgtagacgaacacactattaatgttgacccagttgaaggtggagataaggttgagttgaaggccgataacgttattatcgccactggatctgagccttctcctttcccaggtattacggtcgatgaggaaagaattgtcacttcaactggcgctctagacctcaaggaggtacctaaaagaatggctataatcggtggtggaattattggtctggagatggcctccgtttggagtcgtgtcggatctgaggttactataattgagtaccgtgattcaatcggggctggtatggatgctgaggtggctaaatcgactcagaagttcctgactaagcagggtttaaagtttaaatgtggcgccaaagttactaagggtgaaagagtcggtgaagtcgtcaacattgagatcgaaaccacaaaggacggaaaaactgagcaatttgaggctgacgttttgttggtggctgtcggaagaagaccctataccgaaggacttaatgctgaagcaatcggtttagattttgataatagaggtacgcttgtgattgactcagaatatagaactaagcatccgcacatccgtgttattggtgatgtcacattcgggccaatgcttgctcataaggctgaagaggagggtatcgcagcagcggagttcattaagaaaggacacggacatgtgaactatggcaatatcccttccgttatgtatacccacccagaggtcgcctgggttggacaaaacgaacaacagttgaaggaagccggtattaaatacaaagttggaaagtttccattcattgcaaacagtagagcaaagaccaacctcgatactgagggttttgtcaagttcttagccgatgccgaaacccagagggttcttggtgtgcacattatcggcccaaacgctggtgagatgatcgctgaagctggtttggctttggaatacggcgcttctacagaagacatcgctagagtctgtcacgctcatcccaccctatcggaggcctttaaagaggcagcactaggtactttcgataagacaattaacttttaa

SEQ ID NO: 3669 - DNA, 669 bp, Artificial Sequence
  Optimized genes for Pichia pastoris
atggcaagacgaccagccagatgttacagatattgtaagaataagcctttccccaaatcaagatataacagaggtgtcccagaccctaaaattcgtatctatgacttaggtagaaaaaaggctgcggttgatgatttcccactatgcgtccacttggtgtccaacgaaattgagcaactgtcttctgaggctcttgaggccgcaaggatctgtgctaacaaatacatcactacccaaagtggtagagattctttccacctcagaatccgtgttcatccataccatgtcctgagaattaataagatgttgtcctgtgctggtgcagatagacttcaacaaggaatgcgcggtgcctggggcaagccgcacggactggccgctagggtgactataggtcagattttgatgtcaattagaacaaaggatagcaacaaggctgttgttattgaaggacttcgtcgttcccgttacaagtttccaggccaacagaagatcattatttctaaaaagtgggggtttaccccattggatagagaagactacatcgttaaaagagcctcgggtgaaattagagacgacggagcttacgtaaagtttttgactaagaagggtcctttgcaagagaacttagaacagttccctgactataactacgctgaggctaattaa

SEQ ID NO: 3670 - DNA, 459 bp, Artificial Sequence
  Optimized genes for Pichia pastoris
atgagccaaaatgaaagaacttttatcgctgttaagccagatggtgttcagagaggtttggtaccagagattctttcaagattctggaacaaaggatacaaattggttgctattaaattaaccttggccaacgaggatctgcttagagagcactacgctgatctcacctctaaaccttttttcccttctttgctgagttatatgctttctggtcctgtcttagccactgtgtgggaaggaaaggacgttgtcaagcaaggtagggctttgctgggtgctacgaaccccttggcatccgcaccaggtacaattcgtggagattttgccgtggacatggggcgtaatatcatccatggctctgactccgtcgagtcagctgaaaaggagattggtttgtggttcaagaaggaggaattggttgactataagccaactctaacctcgtggatatacgaataa

SEQ ID NO: 3671 - DNA, 960 bp, Artificial Sequence
  Optimized genes for Pichia pastoris
atgaagttcggtttgggttcattaggtttagctgttgcgcttatcccaattgcttcagccttgtacagagttgacgattacgagacctacgttcctactacagtaggcccacatccaacaggtgctattgagcctgccgaagatcaggtcgatatcaaagtggaaccaactgtctattctcaactgttggacgagtttgaaaacgtcttgggtgaatctgatggtatggttaatcacgacaacttggcaagcatttggatgtcgttttccatgattgtggtctcagagatcggcgataagacctttttgatcgccgctttgatggctatgcgttcccctagatggcttgtattcgcaggtgcttcaagcgccctcgtcgttatgacagttctctcctgcatagttggacatatccttccgaccttgttgacagagaaaaccacgaagactcttgcttccattttattcgttgtcttcggtatcaagttagcaaaggagggatttgaaactcccaaggacgtcggagttgaagaagagctggctgaggttgaggaagagatcgccctgtcttccatcaacaacaaactagacgatgctgaaactgggtctgtatctggttccaataagaaaaagtaccaaactaccttgtctcacttactggaagagaccaaagaactgctctctttcatattgtctccaaccttcttgcaggttttcactatgacttttttgggagaatggggagacagaagtcaaattgctactattgcaatggctgcctctgctcaattctatttcgttattgttggtagtgtgttgggtcatgccctgtgtactggcattgcagtgttgggaggaaagctactggctggtcacatttcgttgagagccgtcaatctaggtggtagtcttgctttttttatttttgctttcatttacctttacgagatctatatgtaa

SEQ ID NO: 3672 - DNA, 1296 bp, Artificial Sequence
  Optimized genes for Pichia pastoris
atgaaaatctcagccctaacagcttgtgctgtcacgttggccggtttagccattgctgcaccagctccaaagccggaggactgtacaacaactgttcaaaagagacatcaacataagagagcagtcgcttacgattatgtgtacgttactgttaccattaatggacagggtgaaacgatttctccaacagtcgttgctgagttggaaaccgtgtctactcctgctacctcatcttccgcggttgccacttctagcgctcctgctacgacttctagtatccctgagacaacatctgcacaggtgactacttcttcagtcgccgaatccacttcggctcagtttacttcatctactgaagaggcatcatcttctgtcgaacaaactacccaatcctcgtcaagctcatctccatccagttcctcgtcttcctcaagttcctccggttcttcctctggtagctcttctggtggaattgacggtgatctgtcttggtactctggtccaggcaataagttccaagatgggactattaagtgttcggaatttccatccggaaacggcgtcgtggctcttgatcacttgggattcggagggtggagcggtttgtaccacccttctgacaccagtaccggcggaatctgtgagccagatacttactgttcctatgcctgccaaagcggtatgtctaagacccagtggccatccgagcaaccagacaacggcgtttccgtcggtggattgtactgtgattctgacggttacttgtatagatcaaaaaaggatactgactacttgtgtgaatggggtatcgacgtggcctatgtcgtcagtgagattggaaaaactgctgccatttgtagaactgactacccaggaaccgagaatatggttattccaaccgtagttagtcccggtggtgagctgcctctgacaactgttgaccagtcgtcctattacacttggcgtggaatgaagacctctgcccaatactatgttaacgacgctggtgttgactggaccaccggttgcacctggggtgattacggtacagattacggtaactgggcccctcttaactttggagctggttacgataacggtatatcttatcttagtttaattcccaatcctaacaacaaagactctttgaattacaatgttaagatcgttgcttacgatgattcatccgttgtaatcggagaatgcaagtacgaaaacggatcctataatggtaacggttcagatggttgtaccgtagcagtcaactccggtaaagctaagttcgttctctattaa

SEQ ID NO: 3673 - DNA, 513 bp, Artificial Sequence
  Optimized genes for Pichia pastoris
atgaccaggtactcggctgtaccagccaaccctgacagatccgcatctgcgcgaggtagttaccttagagtcagctttaagaatactagagagactgcccaagctgtcaacggttggaaccttaagaaggctcagcaatacctcgatcaagtgttggatcataaacgtgctataccattccgtagatttaacagttctatcggaagaactggtcaaggtaaggagtttggtacagataaagctagatggccagctaagtcagttaaattcatccaagacttattgaagaatgccgaatccaatgctgaatccaagggcctagacattgattctttgattatttctcacattcaggttaatcaggctcctaaactgagacgtcgcactttcagagctcatggaagaattaacgcatataactcatctccttgtcacattgagttgatcttgtccgaaccagacgaggcaatcgaaaaggccaaggaagagcccgcccaactgaccgaggcctaa

SEQ ID NO: 3674 - DNA, 1131 bp, Artificial Sequence
  Optimized genes for Pichia pastoris
atgtcttccattgccttccacacatttcgaggatcaagagctaaaatggccaccgcacttcttttgactggtgctgttggtgctggatcataccactacgagaaaaagagacgccaattcaacaaccgtaataacaacaataacaataacaaaaacaacaagaatttcgctaaggccctgttcggtttttcaactggtactgccgcagccactctaaccgatgagtccaaggttaaagtcgccacgttgtctgacatccattcttttaaagaatatcaacaggtgtataacgacattgctaagaaaatcgaggacgaggacgacttcgatgtagatggtagtgctggccccaacttagttcgtttggcttggcatagcgctggtacatacgataagtacgacaaaaaccctcatactaacggtggatcctatggtggcaccatgaggttctccaaggagggtggtgacggtgcaaacaacggcctagctaagggcagagaattccttgaaccactcttaaaaaagtacacctggctttcccacggtgatctgtggactctggctggtgtcgtagcaatccaggagatgggtggtcctaagattaagtggagacccggtagaaaggacttgtctgaagaataccaagctccaaacggaaagttgcctgatgctgctcaaggtccagattatgttagaaaatttttcaataggttggattttaccgatagagagatggttgctctgataggtgctcacacattgggtcgttgtcacgttacttcatctggatacgatggaccttgggacttcgccccaactatgttcgacaatggattctttactcaattacagaagggagtcggaagcggggaagggcaatggcatttaagaaagtgggacggtccagagcagtacgaagataataactcgaattcgttgatgatgctgccagctgacatggcgcttgttcaagacccgaagtttaagaagatcgtggatgaatttgccgcctctcaagaggcattctttaatgagttcgctcctgccttccaaaaattgttggaatccggaattcattttccaaaggaaagtaaggagctcgtctttcgtaccttggatgaacagtcttaa

SEQ ID NO: 3675 - DNA, 1533 bp, Artificial Sequence
  Optimized genes for Pichia pastoris
atgtctcagcctcctaagtggactacgtctaacggtgctccagtatcagatgtgttcgctactgagagagccacttttgataacgcaaaccatgccaacaacgcacctaaggttggaccactcctgctacaggatttccaattgatcgattcattggcccacttcgatagagagagaatacctgaacgtgtggttcatgctaaaggagctggtgcgtttggtgaattcgaggtcacagatgatatctcggacgtatgtgccgctaaatttcttgacaccattggtaaaaaaactagaatttttactagattcagtactgtcggtggagagaaaggtagcgctgactctgcaagagacccaagagggttctctacgaaattttacaccgaggaaggcaatctggatttagtctacaataacactccaattttctttattagggatcctagcaaatttcctcacttcatccatacacaaaagcgtaatccagccacaaaccttaaggatgctaacatgttctgggactacttggtcaataatcaggagtccattcaccaagtaatgtacttgttctccgaccgtggtactcccgccagtctgagaaagatgaacggatattcgggtcacacatacaagtggtataataagaagggtgagtgggtttacgttcaggtgcatttcaagtcagatttaggagttgttaactttaataacgaagaggccggtaagttggctggcgaagacccagattatcacactggagacctgttcaatgcaattgaaagaggtgaatatccttcttggacatgctacatccaaacaatgacccaagagcaggctgctaagcaaccattctccgtcttcgacttgactaaggtttggccccataaggatttccctctcagacgctttggtaagtttactcttaacgagaacccgaagaattatttcgctgaagtcgagcaagccgctttctctccatcccacaccattccttcgatgcaaccttccgctgacccagtgttgcaatctagacttttctcataccctgacacccatcgtcacagattgggagtcaactaccaacaaattcccgttaactgtccagtcgccccagtctttaccccacaaatgcgtgacggttcaatgaccgttaatggaaacctaggctctaccccgaactacaaatcttctttctgtcccttttccactgaggcacagatccaaactaactcccataccccagaagaagtgttggctgcccacaccgaaaagtttcattggggtgggattctggattccaaatcatatgatttcgagcaaccacgtgctttatggaaggttttcggtaagactcctggtcagcagagaaatttttgtcacaacgttgctgttcacgttgctgcagctaaccatgagatccaggacagggtttttgaatacttttctaaggtttatccagaaatcggtgaccaaattagaaaggaagtcttgcaattgtctccacgaggagacagtgctgccagattataa

SEQ ID NO: 3676 - DNA, 1257 bp, Artificial Sequence
  Optimized genes for Pichia pastoris
atgcaattcggcaaggtgttgtttgctatctctgctttggccgttaccgctttgggtgaaaccactagtagtttgtcagccaccctgacttcaactaccagaatcagtatcgcttcaggatgctcccttgaagacttcaccgccactgcacagtctaatcttgatgagttaagtgattgtgaagctgttagaggagatattcatatcgctggttccttgggatccgcagctattgccaacgtcaaggcaatttatggttcattgattgtaaaaaatgcaacttctcttgtctccttaactgcagacagtctgactaccattactgaacagctggctctgtccgagttaaccattttagatacactttcatttgcacaattgacttctgttggctccatttactttgtcacattgcctgccttggaagaaactggattccacacaggtgtttctgacactgagtcggtctacatctctgacacagccctcactaacttggatggtattgttgctactgatgtggacgtgtttaacgtcaataacaacttcaacttggacaccgtagactctcacctagagaccgtctcctctgccctcgaggtgtcgttcaactctgacgatgtcgaagtttccttcgataatctcttatgggctaataacataacctttcgtaatgttgcttcggttagcttgaacaatctaactacggtcaacgcgtctcttggtttcatagagtcaggcttccagaagttgagttttccagggattacacgtgttggtggttctttctccattgtggacaatgatgacctagaagaaatcgatttttctaacgtacaatctatcggtggaggtttaatcatcgctaacaactctaaacttaccgacttctcagagtgggaggacctgcaaacggttggtggtgccttggttttggagggatcttttgataacggttctttcccatccttgagagccgttagaggggcattttccctggagtctgatggtgatatcagctgtgacgacttctctgatattaggggagatactgctggtgaataccaatgtagcgctgctagcttttcaacatctgcttccgctcaatcatcctcctctagcacttctaccggtggttcatctactcatacgggatcttcgaccgccacatcctcttcgtccgaggacgctggagtcgccctggccccagcttccctttttactctgctagctagtattgttttgggtttcttgtaa

SEQ ID NO: 3677 - DNA, 1512 bp, Artificial Sequence
  Optimized genes for Pichia pastoris
atggtcgtcccacgtttgtactactcaacttctcgtgccgctttacaaacagcaagagctaatcagcgtcttgctagaggtttggccactgcagctgctagtacaggtaaggttcgagctgttatcggtgcagttgtcgatgtgcagttcgagcaaggtcaactgcccgacatcttgaacgccctggaactccaaaacggtgatcagaaactagttcttgaagttgctcagcatttgggtgagaataccgttcgtaccattgccatggacggtactgagggattagttagaggtacctcagttaccgacaccggttcacctatttcagttcctgtgggtaggggtactttgggaagaatcatcaacgtcatcggtgagccaatcgatgaaagagggccaattgaatgtaagcagcgtaatcctattcacgcagatcctccatcttttgtcaaccaatccactgctgccgaagtccttgaaactggcatcaaggtggttgacttgttggccccatatgccagaggaggaaagatcggtttgttcggaggtgctggtgttggaaaaacagttttcattcaggaattgatcaataacattgctaaagctcacggtggtttttctgtttttaccggagtgggtgagagaactagagaaggcaacgacttatacagagaaatgaaggagactggtgtcattaacttggagggagattccaaagtcgctctagtctttggccaaatgaacgagcctccaggagctcgtgcgagagttgctttgacgggattaaccattgcggaatacttcagagatgaggaaggacaagatgtcctattattcgtggataatattttccgcttcacgcaagccggctctgaagtttccgccttgctgggtcgtattccttctgctgttggataccaacctactctggccactgatatgggacttttgcaggagagaataacaactactcaaaagggttccgttacctcggttcaagccgtatacgtaccagcagacgaccttaccgacccggctcctgccaccacttttgcacaccttgatgctaccactgtcctgtccagagggatctccgagctgggtatatatccagctgttgatccattggactcgaagagtagacttctggacgtggctgttgtgggtcaagagcattacgaagtagctacacaagtacaacaaaccctccaggcttacaagtctttacaggatattattgctatcctaggtatggacgaattgagcgaacaggacaagcttactgtcgagagggctagaaaaattcaaagattcctgtctcaaccatttgcagttgctgaggtcttcactggtattccaggtaggctcgttcggttgaaggacacagtaagaagctttaaagaggtgttggacggcaagtatgatcatttgcccgagaacgctttctatatggtcggtggaattgaagatgttgtcgccaaggcagagaagttggctgccgaagccaattaa

SEQ ID NO: 3678 - DNA, 1731 bp, Artificial Sequence
  Optimized genes for Pichia pastoris
atgtctttgattggtggtggatcagattgtgctgctggctccaacccattggcccagtttacaaagcatacacaacatgatacttctctgcaacaatctatgagaaacggtgaattccagcaggggaaccaacgtatgatgagaaatgaatccaccatgtctccaatggaaagacaacagatggatcaattcatgcaacagcaaaacaaccccgcttttaactttcaaccgatgcagcatgagctcaacgtgatgcaacagaacatgaacgctcctcaacaagtagctaacaactcttggaaccaagagtttaggatgaaggaccctatggttgccaatgcaccatctgcccaagttcaaacccctgttcaaagcaccaattgggcacaagacttccagcaagctggcccagaggttcagcatcacgctcaacaacaccaacacccaatcttgtcagttcccggagttcgtgctggtatttatggtggaggaaggttgatgggtggatctatgatgaatagagccgctcaaatgcaacagcagaacccagctcaggcccaaacttccgaacagtctcagactcagtgggaagaccaattcaaggacattgagtcaatgttgaactccaagactcaagagcccaaaactaagcaacaggaacaaaatacatttgaacaagtgtgggacgacattcaggtctcctacgcagacgttgagttgaccaatgaccaatttcaagctcagtgggagaaagattttgcccagtacgccgaaggtcgtttgaactacggtgagtataagtacgaggaaaagaatcagttcagaaacgatccagatgcttatgaaattggaatgcgcctgatggaatctggtgctaaactgagtgaagctggtctggccttcgaggcggcagtccagcaggatcctaaacacgtcgatgcttggctcaagttaggtgaagtccaaacccaaaacgagaaagagtctgacggtattgccgctttggagaagtgcttggaattggatcctactaacttggcagctttaatgactttggctatctcgtacatcaatgacggttatgataatgctgcttacgctactcttgaaagatggatagaaaccaagtatccagatatcgcatccagagcccgttcttccaaccctgatctcgacggaggtgatagaattgagcaaaacaagcgtgtgacggagctgttcatgaaggcggcccagctaagtcctgacgtcgcctccatggatgccgacgttcaaacaggattaggtgtacttttctatagtatggaggagttcgataagactatcgactgttttaaggctgcaatcgaggtcgaaccagacaaagctttgaactggaaccgacttggggctgctctggccaattacaataagcctgaggaagccgtcgaggcttactcaagagcacttcaattaaatccaaactttgttagagcaagatacaatttgggtgtgtctttcattaatatgggaagatacaaggaagctgtcgagcatcttctaaccggtattagccttcacgaagttgagggtgttgacgcctcagagatgtcttcgaatcaaggactacaaaacaacgccttagttgaaactttgaagcgtgctttcctgggcatgaacagaagagatcttgttgataaagtatacccaggcatgggtttggctcagtttagaaaaatgttcgacttctaa

SEQ ID NO: 3679 - DNA, 414 bp, Artificial Sequence
  Optimized genes for Pichia pastoris
atggccagaactaagcagacggctagaaaatctaccggtggaaaggctccaagaaaacaacttgcctccaaggctgctagaaaatctgctccctcagccgcaggcggtgtcaagaaacctcacagatataagccaggtactgtcgccttacgtgagattagacgcttccagaagtctaccgaattgttgatccgtaagttaccttttcaacgtttggtgcgagagattgcccaggacttcaagacagatcttagattccaaagtagcgcaattggagctttgcaagaatcggttgaggcttacttggtttccctatttgaggatactaacctgtgtgcgatacatgcaaaaagggtaaccatccaaaagaaggacatcttgctggctaggagactcagaggtgaacgttcataa

SEQ ID NO: 3680 - DNA, 312 bp, Artificial Sequence
  Optimized genes for Pichia pastoris
atgtctggcagagggaagggaggtaagggacttggtaaatcaggagccaaaaggcatcgtaagatcttgagagacaatattcagggtattactaagccagctataagaagattggctcgtagaggtggagttaagcgtatctccgctctgatttacgaggaagtcagagccgttttgaagactttcctggagaacgttattcgagatgctgtcacctacactgaacacgctaaaagaaagaccgttacatctctagatgtggtatacgcattaaaaagacaaggtagaactttgtatggttttggtggttaa

SEQ ID NO: 3681 - DNA, 588 bp, Artificial Sequence
  Optimized genes for Pichia pastoris
atggcccctataattcaaaagcctgctcctttctttaagaagaccgccgttgtcgatggtgtatttgaggaagtctctttggaccagtacaaaggaaagtgggtgctgctggcattcattccacttgctttcactttcgtctgtcctacggaaattatcgcttattcagaagctgcaaagcaatttgccgaggagggtgcccaagtcctcttcgcttccactgacagtgaatacagcctgcttgcttggactaatgttgcgcgtcaggacggtggtttgggtccagttaacatccccctattggccgataccaaccataccttgtcaaaggattacggtgtattgatcgaagaagagggagttgcacttagaggaattttcttgatcgacccaaagggcgttttaagacaaattacaatcaacgatttaccggtgggaagatcggttgaggagtctttaagactattgaaagcttttaaattcactgatgaacacggggaggtttgcccagctaattggcagccaggtgccgatacaattaaaccagaggtcgacgcttctaaagaatttttttccaagtctaagtaa

SEQ ID NO: 3682 - DNA, 225 bp, Artificial Sequence
  Optimized genes for Pichia pastoris
atgtttagattggctgcaagacaaactcctaagcgtatgttttctaccagtcgtgtagctgcttcaggagctcacggtgatgtgggcccatattccaaccttccctttaaagtcaagaatagaagggttccttacgccgttccacatttcttatttttcgccattggtatgggtatcccattcttcgcttgttacgtccagctgaagagatctggatctatttaa

SEQ ID NO: 3683 - DNA, 1269 bp, Artificial Sequence
  Optimized genes for Pichia pastoris
atggagcgtttgtctcagcttcgcaagcatttggctggtgacgacccagttgaaagactcaccgctaagaactctgacgacgtcgtcattgttgcggcctttaggacagctgtaacaaagggtggtaagggtaaatttaaagacgtgaacagcgacgttttgttgcaaaagttaatcgaaggtctgttcgagcaaaagcttcctccaggattcgataagtcactgattgaggaggtcactgtaggaaatgttcttaatcctggtgctggagccaatgagcaccgtgccgctatgctagctgccggtattcctagctccgtgccatttctagctattaatcgtcaatgtagttccggattgatggctgtaaacgatgttgcaaataaaattctggtcggccagattgcttgtggtttggctgcaggtgtggagtcaatgtcgagtaactacggaccctccgccatgcctaaggtctcgaagtctgtactgaagcacccagaaggcgctaaatgcatgattccaatgggtataactaatgagaacattaactcaaagttcggtatctcaagaactgctcaagacgaatttgccagtaactcttaccagaaggccgaaaaggctgttagagagggtcaattcagagaagagatcatcccaatccaggtggaagttgaagatgaggatgatgagaacgacgacgacgatgctcctgcaaaaaccaagactatcactgtcgaccaagacgagggacctagaccaaacgtcactgttgaatctttgggcaaactgcgacccgcattcaagaaggatggatctacccacgccgggaacgcttcccaagtgtctgatggtgccgccgttgttcttttgatgagaagaaatatggctcaagatttgaacttgccaatattaggaaagtatatcgcctgtactactgtgggagttccgcctgaaatcatgggcgtcggacccgcatatgctattccagcagttttgaaactagtcgatttgccaaaggagaaggttacggtttacgagatcaacgaagcctttgctggtcaagctttgtactgcattaacaaagtcggtctcgataagaataaagttaacccaaacggtggtgctatcgctttaggtcatccattaggatgtaccggggctcgtcaggtctctaccattatgagagaacttaaacctggtgaaattggtgttacctccatgtgtattggtacaggtatgggtgcagccgccgttttcgctagagaataa

SEQ ID NO: 3684 - DNA, 516 bp, Artificial Sequence
  Optimized genes for Pichia pastoris
atggctgcagttttttttccaagaacttgtttcaagtgtggagaagttggtcatctggctgagaactgtcagcaagaacaaaagttgtgttacaactgcagagcccccggccacgaatccaacgattgtccagagcctaagcaaacttccagtaagcagtgctacaattgtaatgagaccgggcatgtccaatcagaatgtgaacaaccaaagaaggccgctaagtgctattcgtgcggtaaattgggtcacttctctagacattgccctaactcttcttctgctagctcagcaggtccggtagcctcctcctctactatttgttacaaatgcagtggtcctaaccacttcgctagagactgtcaggctggatctcctaagtgttacgcttgtggtaaacttggacacatttctaaggactgtaccgtgtccggtggttctacaaaagcctgttataattgtggcgagcaaggacatatctcacgtgattgtccaccaactgccgaggctaactaa

SEQ ID NO: 3685 - DNA, 327 bp, Artificial Sequence
  Optimized genes for Pichia pastoris
atgccaccaaagatccagcagagtaaagccgctaaagccgccgccgctatggcaggatccaagaagtcgaagaagaagtggagcaaaggtaaggtcaaagataaagctcaacatgctgtgattcttgagcaagataagtacgacagaatcatgaaggaggtaccaacttaccgttacgtttccgtttctgtcttggtcgatagattgaaaattggtggctcaatggctagagttgctttaagacagctagaaaacgacggtgttattaagcctgtgctgttgcactctaagcaacaaatttataccagggcaacagcttctgaataa

SEQ ID NO: 3686 - DNA, 975 bp, Artificial Sequence
  Optimized genes for Pichia pastoris
atgtccaattctttagaacagttaaaggcagctggtactgttgttgtgaccgacaccggggagttcgaatctatcgccaaatacacccctcaagacgcaaccactaatccatctcttatattggccgcttctaacaaagctgaatatgcaaaattgattgatatcgctgttgattatgcgaagaaacaaggcggttctgtcgaggagcaagctaacattgcccttgatagattgcttattgagttcggtaaggaaatcctaaaaatcgtacccggtcgagtcagcactgaagtcgacgcacgtttatccttcgataaggaagcaacgataaagaaagctctcgagattattgaattgtacaagtctgttggagttgaaaaggatagaattttgattaaaatcgcttccacttgggagggtattcaagcagctagagagcttgaagccaaatacggtattcactgtaaccttacactgttgttttcattcgtgcaggccgttgcttgtgctgaagccaaggttaccctgatttccccttttgtgggaaggatcttggactggtacaaagccagcacaggaaaggactacaagggtgacgaggatccaggagttcaatctgttaaggctatttttaactattacaagaagttcggatatgacaccattgtcatgggcgcttcctttcgtaacactggtgaaatcaaggccctggctggttgtgactttttaacaatcgccccaaagctgttggaggagctgctaaactcgaaagaacctgtcccacagaagttggacgcttcagctgcttcgagtttggatattgagagagtatcttacatcgatgacgaggccgcttttagattcggtttgaatgaggatgctatgagtactgaaaagctatcagagggtatcagaaagttctccgccgattgcgtcactttgttgaatctcctgaaggaaaaggttcaagcttaa

SEQ ID NO: 3687 - DNA, 2766 bp, Artificial Sequence
  Optimized genes for Pichia pastoris
atgcgttttttggtctcttctttcagacctttcagacataccatatcatctcatatctctatgggtcaagctttatccgctatcagagtcttccataaaaattcacactcacgtactcaaggtcttagacgacattctcattactgctgtcacagaaagattgacatgtccacatccaccaaacttccagaacgtcaattgcttccagcaaacgttagaccaacaaaatatgatttgactctcgagccattgttctccacttttaagttcaacggagaagagactatacacttggatgttcaagaggacagttccagtattactctgcatgctttggacattgatctccaggattcccttttgatcaccagtaacaagtctaaaacaccacctttgcatgtcacttctaacgacgatgaccagtctttgacgtttcaattcaaagagggtacattggttaaaggagacaaggtccaattacagctgaagttcgtcggtgaactcaatgataagatggctggattctatagatcatcttacgaggagaatggtgaaacaaaatacctggccaccactcaaatggagcctactgattgtagaagagcttttcctagctttgatgaaccttctttgaaggcagttttcaacattgctctgatagctgaccagaagttgacatgtctaagcaatatggatgttaaggaagaacagtctctaggagatagaagaaaaaaggttatttttaacccaacccctctcatctccacttatttgatcgctttcattgtgggagatttgaagtatatcgaagctgactacaattacagaatcccagtgagagtttatgctactcccggcttggaaaaacaaggtagattctcggttgaattggccgctaagactttggagttcttcgagcagcaattcgatattgattaccctctgccaaaaatggacatggtggcaatacacgatttctcagccggtgccatggaaaacttcggcttagtcacgtacagggttgtagatttgctatacgacgaaaagaattccaacctggccaccaagcaaagggttgctgaggttgttcagcatgagctagctcaccagtggttcggcaacttggtcaccatggaatggtgggaggggttatggcttaacgaaggatttgctacctggatgtcatggtacagttgtgacaagttcttcccagattggaaagtgtgggagcaatacgtgactgattcccttcaacaagccctggctcttgacgccttgagagcttcgcaccccatcgaagttcctgtaaagcgtgcggacgaaattaaccaaattttcgatgctatttcttattcaaagggtagttccttgctgaaaatgattagtaagtggctgggtgaagacgtgttcatcaagggtgtctcatcatacctgaaaaaacaccgttatggtaacaccaaaaccacggacctttgggaatcattgtccgaggtctcgggaaaggatgtcgtaaaggttatgtctatttggaccggaaagattggtttcccaattatcagcgtcactgaaaacgccaaccgtatcacttttactcagaatcgttatctaactactggtgatgttacaccagaggaagataccaccatttacccggtttttttaggtttgaagaccgagtcatcgactgatgaatctttggtgcttgactctcgctctatgagcgttgacattcaaaattccgatttttttaaggtgaatgctgaacaagcaggaatctacagaaccaattacgcaccggagcgttggattaagctgggtaagcaaccccacttgctgagcgtagaggatagagctggccttgttgctgacgctggtgccctagcctcaagtggacactcgtcaactagaaactttctgaacttggtcaactcctggaaggacgagtctagcttcgttgtatgggatgagattacttctagggttgcggccttgaaggcagcctggttattcgagtctcaatctgacattgatgccttgaatgcctttgttagagatcttatctccacgaaaattaagtctatcgggtggtcttttaacgacaacgagccatttttagaacagagattgaagtccttattatacgccaccgctgcaggtgcaaaggtcccaggtgttgttaaatctgcacttatcaatttccaaaagtacgttgctggtgataagactgctattcaccctaacatcaaggctgttactttccagactgtcgcagctcaaggttccgaaaaggagtgggaccaacttttagacatttataaaaatcctgtgtccattgacgagaagatcattgccttacggtctctgggtagatttgaggacccaatcctgattgccaagacattagctttgctctttgatggatctgtaagaagtcaagacatctacgtccccatgcagggtctaagagctactaaaattggtgtcgaatctttgtttaagtggttgacactcaactgggataagatctacaagcttttgcctccaggactgtctatgcttggttctgtcgttaccattagtacatccggatttacctccttggacgatcaaaaaagagttaaggacttttttgcctcgaaggacactaaaggtttcgaccagggtttggctcaagccttggacaccatccaatctaaggcttcttgggtccagagggattcacgaaacgtttccgactggttgcgtgagcagggctataagaagtaa

SEQ ID NO: 3688 - DNA, 1581 bp, Artificial Sequence
  Optimized genes for Pichia pastoris
atgatgactgatcaaattggcaaccaagcttcccctgcctctaatagctacttaaataacgacggtatcgacgaattgactccaatgactagaaggaagcgagtctcttcgctgtccttatccgaccaatgggctgggtccttgcaaatgacacctactaccggttcaactggtaacctgaagaggatcggcagttccaagctctccatcaacaacggacttaacgccgtgagagtgaagaagactgtgattgatcatgttagagttgcctcttacgcttttgcatttgacattgacggagttatagttaagggtccagagaccattcctgaagctaaggaagctctaaaattgttgaacggagctaatgaatataacattaaggtcccatacatttttgttactaatggaggtggaagagccgagcaagcccgtgcagaagaactttcaaagagattggacattgaggtcaccgaggaccaggttatccagggtcatacacctatgagagagcttgtctcagtatacaataatgttctagtcatcggtggagtcggtgacgcttgtagaaaggtcgcggagaagtatggtttcaagaatgtttttaccccactggatgtcatgaaatggaacccgtctgttacgccttatcataacttaactgaagaggaattggctgttgctcgcgatgttgacttctccaacacaggtattgatgccatccttgtttttgctgattctcgtaactgggctgccgatcaacaaataattctagaattgctattgtctaagtctggatttatgggtaccgtatccgacagtttcgaagagggtccagctctgtactttgctcattctgattttgtctgggcaaccaattataatctttcaagatacggcatgggagcccttcaggtttctattgctgccttatacagagaacacactggtaaggaactgcaggtaacgagattcggaaagcctcaacgtgggactttcaaattcgcatcgaaagttttgagtcaatggagaaaagatgtattggaagaacatgttgaggagctgactactgaggagggtactagtgatatggaggaacaatcccctggtgaccctttgttgaacgacccatctcagaacatgaacagaaactcaaagccaaccttgctggcaaccgaatctgaatctgagtcagattctgataacgagggtttgacagtggagaagttgtccaagctcacactcgacttgcccccagctagcacagtctatttcgtgggtgatacccccgaatctgacatccgtttcgccaactcccacgatgaaagctggtactctatcctggtcaaaactggtgtgtaccaagagggttcgattccaaagtacaaacccaaacacatctgcgagaatgtcttggaggccgtcaagttcgctattgagcgtgagcacagtaaagagttagaagaatggaataactctgcagttgatccagacgctgctaccacccagttatcaccattgactcttgttgaggagactaaagttgttccaaaaaagcactcagctaagttcgaaatgtaa

SEQ ID NO: 3689 - DNA, 885 bp, Artificial Sequence
  Optimized genes for Pichia pastoris
atgtctgatcctaagcctttgccttttgtctaccaattcttgtctggtgctattgctggcgtctccgaaattctagtgatgtaccctctcgatgtggttaagactagaatccagcttcaagttggctcaggtgctaacgcagaatatacaggtatcgttgactgcgttaccaagatagtaaaaaacgaaggtttttctagattgtaccgtggtatctcagcccccattctgatggaggctccaaagagggccaccaagttcgcagctaacgacgaatggggtaaattctatagaaatgctttcggagtccaaagcatgacacagtctttggctgtgcttacgggtgcaactgccggtgctacagaatccttcgttgttgtcccattcgagttagttaagatcagactacaggataagtccagtaaatactctggaatgggtgatgtcgtaaagcagattgtcaaaaaggagggtgttctttcactgtataatggtttggaggccaccctctggagacacatctggtggaatgccggatatttcggagtgatttttcaagtccgatctctattaccaaagactgagtcctctacccaaaaaactgccaacgacttacttagtggagcgattggaggtactgttggaactattttgaatactccattcgatgttgtcaaatccagaatccaaaacactgtaaaggtccccggtgttgttccaaagtacaactggaccttgccatctttgttgttggttactaaagaagagggtttttcggctttgtacaagggttttctgccaaaggtcttgcgtttaggcccgggtggagggattcttctggttgtgtttaccacatgtatggactttttcagaaccctgcaataa

SEQ ID NO: 3690 - DNA, 546 bp, Artificial Sequence
  Optimized genes for Pichia pastoris
atgtcatccaccaatacagtgcctcctgtatcgcaatacaaggaattcgaggttataggtagacgtcttccaaccgaaactgttccagagccaaagttgtataggatgaccattttcgccaagaacgagaccatcgcaaagtcacgttattggtatttcttgcagaaactgcacaaggttaaacgtgcttctggagagatcgttgccatcaaagaggttttggaagaacgaccgactgaagtgaagacatttggtatctggattagatacgacagtagatctggcactcacaacatgtataaggagtacagagacgttactagagtcggagctgtccagggtatgtaccaagatttagcctctagacatcgtgctaggtttagatccattcacattttgaaggtcgtagagttgactaacgatgatgacattaaaagacagtacgtcagacaattcctcgaaaaagatttaaagtttcctctaccacatcgcgttccaaagacgcaagctctgtacgctagcaagagaccctccactttttactaa

SEQ ID NO: 3691 - DNA, 306 bp, Artificial Sequence
  Optimized genes for Pichia pastoris
atgtcgttcgttatcagaagaaaattgagtactctcattccaccaaaaattgcctctgccaagaaccttggttccaacccacacgctaagaagatccaggaagtcgtgaagttttataaggctcttccccaaggccaagcatctttccctaaggcttccagccctattggaaagtacggtgagaaatatttcaacgatggtaatgcctctgctaagccattgctgcacctggctttgggtgttattttgtttggttactcactagaatactactatcatttacgtcaccataaaggagagcattaa

SEQ ID NO: 3692 - DNA, 1311 bp, Artificial Sequence
  Optimized genes for Pichia pastoris
atggccatttctaaagttttcgctagatacgtttacgactctagaggtaacccaaccgttgaagtagacttgtataccgagaagggtctgtttcgagctatcgtgccatcaggggcatcaaccggtgtacacgaggctttggagcttagagacggtgataagagtaaatggcttggtaaaggtgtcctgaaggctgtcgctaatgtcaatgatatcattgctccagctatcgtcaaggcaaacatcgatgttaaagatcaggaagccattgacgcctttttgaacaagttagatggtacccctaacaaaggaaaattaggagctaatgctgtcctgggcgtttcgttggctgccgctaaggccggtgcagccgaaaagaacgtcccattgtaccaacatattgcggacttgtccggaacgcctaagccttacgttttgccagttccatttcaaaatgttttgaacggtggttcacacgccggcggtgccctagcatttcaggagttcatgattgtgcccactgatgctccaactttctcagaggctttaagaattggcaccgaggtctaccacaacctgaagtctttggccaagaaaacatacggacaatctgctggtaacgtcggtgacgaaggaggtgtggcacctgatatttccactccaaaggaggcgcttgacctaatttctgctgctatcgaaaaggctggttacaccgggaagattggtatcgctctcgatgttgcttctagcgaattctataaggatggcaagtatgatcttgactttaagaaccctaattccgacccttcaaagtggctatccggtcaggaattggctgctctgtacaaggagctcatttctcaatacccaatcgtttccatagaggatcctttcgctgaagacgactgggctgcctggagtcatttcttctctaccgttgatatccaaatagtcggagacgatttgacagtaacaaatccgattcgtatcaagcgtgctatcgaagagaagagtgcaaacgccttgttacttaaagttaaccaaattggaactttgacagagtccattaaggctgcaactgactcgtatgccgccggatggggagttatggtttcccatagatctggtgaaactgaagacactactatagcagatatcgccgtgggactgcgtgctggtcagattaaaactggagcccccgccaggagcgagagattagctaagttgaaccaaatccttagaattgaggaagaattgggtgataaagcaatctatgccggtaagaattttcacaaatctgtggctatttaa

SEQ ID NO: 3693 - DNA, 615 bp, Artificial Sequence
  Optimized genes for Pichia pastoris
atggccagtccttcgtctaagatccaccatgttaccaacaaaagcagagctaatcttcgtactcaaaagagactggcagcgtctattattggtgccgggaagaagaaagtatggttggatccaaatgagacggagcagattgctcaagccaactcaagagaggctatcagaaagctatacaaggatggtctgattgtcaagaaaccaccagttggacattctagagctagagccagggctttcgccgaggctaagagagcaggtagacacactggatatggcaaacgtaaaggaacagctaatgctagaatgtcaacccaaactttgtggatgcgaaggttgcgcgtgttaagaagactgctcgttaaatacagagacaacggtaagattgataagaccttgtatcatactttgtaccgtgaatccaagggtaacgcattcaaacacaagcgtgctttgatcgaacacatcatacaggctaaggctgaagccgcaagagaaaaagtcttaaaggacgaatccgaggcccgaagagctaagaacagagctcaacgtgaaagaagacagcaaaggcaagccgagaagcgtgaagcttttcttaacgaggaggcataa

SEQ ID NO: 3694 - DNA, 1161 bp, Artificial Sequence
  Optimized genes for Pichia pastoris
atgagcaaaaacgctcaagttgatgaccttgcccacggcttagccggtgctggtggagggatcctatcgatgatcattacctacccattgttaaccctgtccactcatgctcagtcatccaagacacagaaacccttggacggtagtgttgacgaaaaggaactggagcccaagaaatcttccacgtatggtacattgaaaagaattcttaagaaacaaggtgttagaggattgtacaatggtttagaaagcgctattctgggtatcgcagtgaacaattttatttattactacttttacgagctgactggtaatactttggaaggtttgtcccgcggaagaaagcgtggttctcgtgttggtggactttctgcatttcagtccattgttgctggagctatcgccggagtcatatctagaattgcgaccaaccctatatgggtcgcaaatactcgtatgacagtgctgtcccgagagcaaagagatcttaagagagttaacactttgcaggccattttatatattttcaagactgaggggtttaaaaccttgttttctggtctcatcccggccttgtttttggttttgaacccaattatccattatactatcttcgagcaacttaagactttgttggtcaagaccagaaagagagcattgacccctttggacgctttgctactcggtgccttcggtaagctcatttctacagttattacttacccatacgttaccctaaggactcgtatgcacttgcagaacgctgaaaatgctaggaactcctcaggcgaatcttcagtctctaactctgccgtactgtccgctacaagcgatgaagatttgggtaaggaaggagacaacgaaaagaaaattgcccaagagcaaccaactaataccatttggggactatctaccaagatgttaaaggaggagggcatctcttcattctatagtggaatgagtgttaaactgagtcaatcaatcctttctgctgctttcctgttcttcttcaaggaggagttggtttcggcttctgatgtggccattaaggctgtcaagaaggtcgattacaaatcatttttaaacaatccagctcaagtcgtaccagaccttaaccctgcaccttcgccaaacgctgatggttcccctgtggacatctaa

SEQ ID NO: 3695 - DNA, 621 bp, Artificial Sequence
  Optimized genes for Pichia pastoris
atgtctgtttttactcctatcgaagatgctcttaaagcatacaagaatggggaattccttattgtgatggacgacgaagatagagagaatgaaggagatctgattgttgcggctgaactaattaccactcagaagatggcctttttggtcaggtactcctcgggttacgtatgcgtcccattgtctacaaaaagagctgctgagctggagttgccgccaatgatcaagaaccgtacagaccgccaaggtaccgcatatactcacacggttgacgcaagagacggtactactaccggaatttcagcctctgatcgtgctttaacctgtcaggttctggccaaccctagatccaaacccgaagagttgatgagacctggccatatttgtccactgatcgctagagagggtcttctaaaggagcgtcgaggtcacactgaggctgccgtgcaattgtgtgagttgaccggactccagccagctggagttatcggtgaattagtcagagatgaagacggttcaatgatgagattggatgattgtgtccaattcggtttgagacataacgttaagataattaatttagaccaaatcattgagtatatggatagtaagaacagctaa

SEQ ID NO: 3696 - DNA, 1683 bp, Artificial Sequence
  Optimized genes for Pichia pastoris
atggccgagatcactttgggtacatatatttttgaacgtctgaagcagattgacgtcaagacaattttcggagttcctggggatttcaacttggcccttcttgaccacatctacgaggttgagggaatgagatgggccggcaacgcaaacgagttgaacgccgcttacgctgctgacggctactctcgcgtgaagtctatggccgctttgatcaccacatttggagtgggtgagttgtctgctgttaacggtattgctggtagcttcgccgaacacgtaggtctattgcatattgtaggtgtgccagctatttcctctcaagaaaagaagctattattgcatcacacacttggaaatggagattttggagtcttcaaaagagtctttaagaatgtatcaaagtcggcgaatttcatttctgatataaacgaagctcaggacatgattgacggtgctatcagagaggcttttatttaccaaagacctatttacttgggcctgcctaccaacctggtcgaaatgaaggttgatagaacccgtttgaacactcccatcgatctaaagcctgttcctaatccagttgaggccgaggaggaggcactccaaagcatcttagagctgatttctaaggcttccaagcctgttatcctagtcgatgcctgcgctagtcgtcacttttgtcaaaaggaagtggaccaattgatcgatgtgactaacttcccagttttcgtcacaccaatgggtaaaggtggtgtggatgaacaaaagccacaatttggtggagcctatgttggttcactttctaaccccgacataaccgaatttgttgaaaaggctgacttagttatttcagttggtgccttgctgtcagatttcaatactggtagttttagctattcccatagtaaaaacatcgttgaattccattctgattacacccagattagatctgctgtcttccagggtgtacagatgaaggctcttctccaaaaacttttaccattggttggtaaggcttcaaagcatatcactgctcaagtcccaccaaaaattgcccccccaatagagaagggtgcttccgaagacttaactcaggactggctgtggtctaacatttctaagtttctcagggcaggcgacgttgttattactgaaaccggtacttctgccttcggaattgtccaatccagattcccaactcacgtgtcaggtatctctcaggtcctttggggttccatcggtttctcggttggtgctaccttgggtgctgtctgtgctaccgaggaattggatccaaacagaagagttatcttgttcgtcggtgacggatccttgcaattgaccgtccaagagatctctactatggcccgatggaacctgaagccttacttgttcattcttaacaatgatggatacactatagagagattgattcacggagaaaaagcatcgtataatgatatccaaccttgggatcacttgaagcttctggatacatttaaagcaaagaactccgaaagtacgagggtttccactgtaggagagctgactaaattatttaaggaccaggggttcaataaaccagacaagattcgtgttattgagatcatgttagaaactatggacgctccgatctccttggtcaaacaagccgaaattaccgcaaaaacgaatgcagcttaa

SEQ ID NO: 3697 - DNA, 909 bp, Artificial Sequence
  Optimized genes for Pichia pastoris
atgcacagaacctactctctgcgttccggaagagctcctaccgccgctgatgtcaataatcctcccccgccaactagtacaactaagtcaaaattctttggcaagaatagtattgcatcttctttaagaaagaacgctgctggtgcctttggaccagagttgtccaagaaattagcccagttgatcaaaattgagaagaacctcgaacgctccatcgagttggtcgcccgtgagagaagaaccgttgctaaacagctttctctttggggtgaggagaatgatgatgacgtaagtgatgttacggacaagctgggtgtgctcatttatgaaattggtgaactagaggaccagttcgttgacaagtatgatcaatacagaataacattgaagagcatccgtaacattgaatctagcgttcagccatcaagggacaggaagcaaaagattactgacgagattgcccatttaaagtacaaagacccacaatcacctaagatccctgttctggagcaagaattggtgagagccgaggctgagtctcttgtcgctgaagctcaactgtcaaacatcactcgtgaaaagttaaaagccgctttcaactaccaatttgatgcactagcagaattgtccgaaaagcttgcacttattgctggttatggtaaggccttgttggaattgttggatgactccccagtcactcctggagagaccagaccagcttatgacggttacgaggcctctaaacaaattattatcgacgctgagaacgcgttgtcgtcttggactcaagataacgctgcagttagaccctctctgtccatcagaaattcggaatacgatgaggagccaaacgaagagtgggaagaaaaggaagaaggggatgagacacgagatgaaacccaggcttaa

SEQ ID NO: 3698 - DNA, 1974 bp, Artificial Sequence
  Optimized genes for Pichia pastoris
atgggtaaatctataggtatcgatctgggaacgacttactcctgcgttgctcacttcgccaatgaccgtgtagagattatcgccaacgatcaaggtaacaggacaaccccatcattcgtcgctttcaccgacactgaaagactaattggggacgctgcgaagaaccaagctgctatgaacccagctaacacagtgtttgatgcaaaacgtctgattggtcgtaagttcgatgatccggagacccaagctgacattaagcattttccttttaaggttattaacaagggaggaaaaccgaacatccaagtcgaatttaagggtgaaaccaaggtcttctcacccgaggaaattagtagcatggttttgaccaagatgaaggatactgctgagcaatacttgggcgaaaagattaatgatgccgttgtcactgttcctgcatattttaacgattctcagagacaggcaacaaaagatgctggtttgattgctgggttgaatgtgcaaagaatcattaacgaacctactgccgctgctattgcatatggattagacaagaaagacgccggtcacggtgagcataacatcttaatctttgatcttggaggaggtacttttgatgtttctttgttgtcaatcgacgagggcattttcgaagtcaaggctaccgccggcgacacccacttaggtggtgaggacttcgacaacagactggtgaaccactttatcgctgaatttaaaagaaagacaaagaaagacttgtctactaatcaaagatcgttgaggagactgaggaccgcctgtgagcgagccaagagaacactgtcttctagtgcacaaacttcgattgaaatagattccttgttcgaaggtattgatttctacacctctattacgagagctagattcgaggagttgtgtgccgacctatttcgctccaccatcgaaccagtagagcgtgttctgaaggacagcaagttggacaagtctcaagttcatgaaattgttcttgttggtgggagtactcgtataccaaaggtccaaaaattggtgtccgattttttcaacggtaaggaacctaacaagtctatcaatccagacgaggctgtagcttacggtgccgccgttcaggccgcaattctgtccggtgacacttcttccaagactcaggatcttttgctgttggatgttgcaccattatcactaggaatcgagactgctggaggaatcatgactaagctcatccctagaaactccaccattccagcaaaaaaatcagagattttttccacttacgctgataatcaaccaggagtattgattcaggtgttcgaaggtgagcgaacaagaactaaagataataacctcttgggtaagttcgagctcagtggtattccacctgcccctagaggcgttccacagattgaggtcactttcgatatggatgcaaacggaattttgaatgtttctgctgtcgaaaaaggtactggaaagactcaaaagatcaccatcacaaatgacaagggtagactttctaaggaggacatcgagcgtatggtctccgaagctgagaaatttaaagatgaagacgaaaaggaagccgagagagtcgctgctaagaacggattggagagttatgcttattctttaaagaattccgcagccgagtctggattcaaggacaaggtcggagaagatgaccttgccaaactaaacaaatctgttgaggagaccatcagctggcttgacgaatcacagtcggcctccacggatgagtacaaagatagacagaaggagcttgaagaagttgctaatccaataatgtcaaagttctacggagctgccggtggtgctcctggtggtgctccaggtggctttcctggtggtttcccaggtggtgctggtgctgctggtggcgcccccggtggagctgcgccaggtggagactctggtcctaccgtggaagaagttgactaa

SEQ ID NO: 3699 - DNA, 1479 bp, Artificial Sequence
  Optimized genes for Pichia pastoris
atggttgaagctacaggcgacattggattgattggtcttgccgtcatgggtcaaaacctgatcctcaacgctgctgaccatggtttcacagtcgtcgcttataacagaaccgtccaaaaggtggatcattttttagctaatgaggctaagggaaaaagtattattggtgctcactctatcgaggagttggtcgctaacttgaaaagaccacgtcgtattatcattttagttaaagctggaaacccagtcgacgcatttatccagcaactattgccccacttggatcaaggtgatattataattgacggtggtaattctcacttcccagatactaacagaagatatgaagaattgaagcaaaagggaatacattttgttggatctggtgtttcaggtggtgaggaaggagcacgctatgggccctcactgatgccaggtggtgctaaggaggcctggcctcacatcaaagaaattttccaatctatcgctgctaagactgatggagaaccttgttgcgattgggtaggtgacgctggtgccggccattatgttaaaatggtccacaacggtatcgagtatggcgacatgcagttaatttgtgaggcctacgatttgttgaagagagttgcgagattaccggactctgaaatctctaaggttttcgctaagtggaacaagggtgtgttggactcgtttctggtggagatcacacgtgacatcttagcctacaatgacgatgacggaaagccacttgttgaaaagattctggacagtgctggtcagaaaggaaccggtaagtggaccgctattaacgctcttgatttgggtatgccagtcacccttattggtgaggcagtgtttgctagatgtttgagcgctataaaggatgagagggttagggcttccaagatcctatccggtccatccgttccagagaatgccatcacggacaaagccaagtttattgatgatcttgaacaagccttgtacgcatcaaaaattatcagttacgcccaggggttccagctgatccgtgaggcagcgaaggagtacaagtgggacttgaacttcccttccattgcactgatgtggcgaggaggttgtatcattagatcagtattcctcggcgagatcactgctgcctacagagaaaaccctgacttagaaaatctactattccacccattctttaataatgccatttccaaagcccaatctggttggagagccactttgggcaaggctattgaattcggtattcctacccctgctttcagcactgcactgtcgttttacgatggttacagatctgaaaaattgccagctaaccttctccaggctcaacgtgattactttggtgcccataccttcaaggttcttcctgaagaagctaacgagagattgaaggtaggagattggattcacattaattggactggaaagggaggaaacgtttccgcctctacttacgatgcataa

SEQ ID NO: 3700 - DNA, 840 bp, Artificial Sequence
  Optimized genes for Pichia pastoris
atgggacagctgttcagaaagattatccagtggatacctttgttgttctttgctggatccgtattgttacaattctttgttatcctttctggtgcacgaactaccggcgttctgaaggacttctactggttggaagtggagggaactggtgcaattgatccacaattcggtactaccagatggacaaattatagaatgtgtaattgggaaaacgatgagctttctaactgcgaagggccacaacctgcttaccccttttcccctgacaacaatttctctgatggagagaacagagccctcattccctctgatttcatcaaccaccgtgatacctactactacctatctagagttggttggtcaatgttgcttgtcggtttagttttcactgtctttagctttttttcaacactcttaagaatcttcttgaaatggaaactggttagtggtttgaactggctgaactctgtctttgctgttttctttgttgctctgggtgcttcgcttatgaccgctgcatatgtcaaaggcaggaactcattcaatgatgcctccgagtttgatgcctcacttggtgtgaagatgtttgcttttttgtggacctctttagccctattgttgttgagtttgcctattttctgttttaagaagccactatcttcgttccatggtggaaccggtactgcttcccacgacgactccatcgaatacaaggaagactatattccaccggctacgggagacgcgtataacccagagccagccggtgactacccacctacacaaaaaagaaagttgaacttcttcaagattaatcgtaagactactattgaggattaa

SEQ ID NO: 3701 - DNA, 660 bp, Artificial Sequence
  Optimized genes for Pichia pastoris
atgtctaagagtgctttgttgatcatcgacctccagaacgatttcttggagggaggctcactggctgttcctgacggtaatgaaattattgacccaattatcgaacttgcccagaagaaagattgggacttggttattgcaaccaaagattggcacccgcaagatcatacctctttcgcttccaaccacggtgttaaaccatacacagaattagaattcactaatcctgagaacgaggccgaaaaaaagattcaagtggtttggcccgaccactgcgtacaaaattctaatggatcagaattccctccaaagttcaaggccttctgggagcaatttactggtccaaaggagctggttaagaaaggttatctgtctgatagagagtactactccgctttttctgacgtttggaagttgcacaagactgagttagactcccttttgaagggtcatggaatcagaaacgttaccattgtcggtcttgctttggatttttgtgtctttcatacggctagcgatgcattaagagagaactattcagtgactctagtcactaacctgaccagatcggtcgctgatcgtgagggacctccaagtaagcttcagtctttgggtgctcatttggccgaatacaacgggtccgaaatcattataaaataa

SEQ ID NO: 3702 - DNA, 858 bp, Artificial Sequence
  Optimized genes for Pichia pastoris
atgtcgagattgattgttgctcttcataccgtactgaaaagatttaaggaaatgggattgtttactgattctgataaggacaacagtgataaactatccgaaagctctagttcaacttcaagtaactggttggataggtacttgtcaattgctagagaagctaagcactctttagccagtaaaatcgaggacgtggccttgcccggagaggatggtacccttttcaacaagaatatcgatactaatagaccagattccatcttcagagctgtttttggtgacgacttcgagacgactttcaacaaagtcgattctttggttaacgctattgcaccagttttcgaccaggatgtatggtctgagcttttcactggctcaaaattagtctcctccaaatacggtttgtgggcataccctattccgtctcatcaactctataaggactgcaactctaagcaggggttgagcgtgtgggacgagcacggttactggcgttgtctgtttccaaaggcccagctgccagaaaattataagtccattgactccaatattatttctaaggaagatgttgaacaagatgactctcacaagctaggacgttttttcaccaacttttcggattatctgaactggagatctgtcatggaagagaatataaaaaagcaacgagtctcatttagcaagcctcaaaaatcttctggttcctcaacatcctactccgaacgtaccttaccaaacggtgagattgaaaagatcgagaagaagcatgagtggttcgttgacggtacagaaagatcgaaggagaccaagactatcatccaccctgacggatctgttactacagagaacattaagtaa

SEQ ID NO: 3703 - DNA, 909 bp, Artificial Sequence
  Optimized genes for Pichia pastoris
atggctgtcgtcactttgaagaacgctattttatctttgttcccagctaacactagtgactctcaaaacgaacctctgctgggtgaggactccactggaaacgccggttacgctgcaagagatgtgcaaggtttggagtccgaaatcgaatctaattccaccaagactcagaacatcagtgaagataatcagaatcaaactgtgttgtggggattatttgaaaaggtagatccaagagttatgagcgatataatcattgggctcagtgacggtttgaccgttccctttgctttgacagcaggtttgtcctcgctgggagattcaaagcttgttattaccggtggtatggctgaattagtttctggctctatctcaatgggactaggtgggttccttgccgccagatctgagagcgaattttataagtctcaagtccgtaaagaaaaacagttgttcttcaacaataaggaacttttggaggaagagttagaggatatttttctggatattggtatgtccgagaccactacagaatccgccattagagacctgtcaaaatctccaaaggcgatgattgactttattattaggcacggcaagggtctggaggagccagctgacggacgtcaagtcacttcagccctaactatcggtctatcatacttcttgggaggtttcgttcctttagttccttacttttttaccgctattgttcaaacaggtttgataatctctgtcttggttatgggtgtgacccttttctggttcggatatcttaaaacggcaatctctatgggtgaggactgttccctctggatgagagtatctgagggattgcagatggttcttatcggttccattgctgctggctcggcctggggattggtcagagttatcgatactaactaa

SEQ ID NO: 3704 - DNA, 1890 bp, Artificial Sequence
  Optimized genes for Pichia pastoris
atgaccgtcgaaactaaccaatttacttatcttcaaggatctacattcgacaaaaagatgactactctgtctcttaagcaaaccgcatacgagttcgttgaaggaatgactggcgactatcattacttgaaaaacctagacgcttccgactccaacctgagatacttaaaggattattccttccctacattgcaagagttaaatctgtcaaatttatcatacctcaagaagctagtctctgatggtgatcaattgagcggactggagaaattgaccgctgacggatctaatatcgagttgattgacataaagggtgatgtgttggcttctatttcctgtagtaataccaaggaacttaaggccatcaagggtgaattgccagctattaattacatttacgctgacaattcatccctcgaatcagtctcattgctgccttatgaggatgaaaagttccaatttaagagaatgtttttcctatacttggtcaactgtcccaacctgatttcctttcagagaggtcagtacccaaagcttagaacggtagacttaagcaatagtactatccaggtgctacattcatccttaatcaaacatttgggtgcattgtatttgggtaatgctaccatcaaggagttcgtcattgacgataacgacaacgaggatgaattgactttgagacagttaaagaccctcaacttgtcaaactctcgtattccaaccaacatgacagattttctgttgcgtcacatcttcaggaaaaagtctaacccgtgggacaaagagtggagttctctaatttggcagtctgtgaacaccgatcaagaagttcaggaagtacagtcctttatcaagagaattcctcaactgaagaagttggacataagtaattcgtctaaagctaactctttgctgtcgaacctggtttctgatattccagagttctggaactctttggaagaccttgatgttttcaattctaacacagagggctttaacttttccaactcaaagtccttgatccatctgggatgttccgatcccgacgccactgttttgaaggttgatgatatgcctgccttgaaggcccttgacgtcctcggtccttcgaacatcgaaactgttaagcttagcaattgcattagacttgagaaggtggacttcactggatgttacgctctgaaacgttttgaaagtgattccttgtcccttttacagttgaagttcagcaataactctttggaaacttggagtctgaacgactcttccattaggtctatcactctcgagaacaacactggtttcagaagacttgagggtaactttccaaatttggagaccttggacatttcgaacagtgccgtcgaggttatcaatattcacgatggttcaaaactgaagaagttgtccattttgcgtacccgctcagttgaagaaatacaaattgataatttatctactctacaagaattacgttacgatacaaaggatgaaaaaaacaccaaagctgtcaaagagttcgctgataagatcttatccaagagagagccatctttcactgcaaaggttttgcaaagagttagattcgaacaccgaggccttttcactggtgggtttagatttttcgacaggagaacggaggagttggtttgctgctttaaagatatcaatatttctgagaacaaaattaatgccaaatgcggtatttgtgaagaaaactatgaagagggacagaagtgtcaaattctttactgtaagcatgcgttccacacagactgtgttgagcaaatgttacaaatgggtaacgacagatgtagacactgtaacgatgagatcgacatcgcttcggtaggtttgtcttctgacccacttccttttcgttggctataa

SEQ ID NO: 3705 - DNA, 1812 bp, Artificial Sequence
  Optimized genes for Pichia pastoris
atgtcatctatcttcatttccttttttaagttggtacaacttagattccgttactactggaatgttttagcatccttcttcccactgcttacattgttgtctgacggattgaaccacgtacttccaccaactaggaagataagcagcgattcagaagaatctcacgagttggatgataagaagtctttgtttccagaatctcaacaaagaattacacagattaaggtcttcaagaacgtgcatccatgttctctgacttttaacactaaacttgttccattcaaaaactcgaacggtgagatggaatggaagtttgtcgaagacaacgagtccgcagagaaatcaccttctttaatggaagatggcttgtccgagtctctcagtcctttcatggctgactctactcaagattctgatgtccatctgatgtttggaacgcctttcttggttaaggaggaacaacaacaacataagcaggagcaacagcaattgcaagagcaagagcaagagcatcaacatcagcagcatcaacagaatcttccttcctcaagtaattctaaggatggctcacaggaccacagttcattggccgaaagttctaaggaactgaacattcataaacgtaacagaagaaaaagagtttcatctgttgttacctctgtgactaatggagaaacttattaccactgttctgaatgtccatccaagttcaagtttagaggatatcttacccgtcactccaagaagcactcccaaagaaaggcttaccattgccctttctacgaatctggccacggaaaatgctcattgggagaaggtttttccagaagagacacctacaaagtccaccttaaagctatgcacttcaagtacccgaaaggagtgaagtgcgctgacagaactggaatgatgggttggtgtgggagttgtggtcagtctttccagaacaacgagatctgggtcgaaaggcatattgagaagggtgtttgtcgtggtctgccagagggttattcctctagaatcatgaccagaaaccgcaagaaaacgggaaaacagtcatctttgttgaatgttgctaataacggtgttaacgagaatccaatgttgaagcttgttatggatggtgaggtggtttctgcccccaagctcgaggatgtcactcacttgttaggtgagtctggttcaaccaacacctggactgaaaactctgagaacgcctcgcgtacaagttccattcatgacctgtctgaccactcctcagctagcgactctttaagtggtcacacttcgggggaaagtctagcaggttctaccaatgatagctcttcccaatccctagatgaagctatcaatcctattggtcatccagtcgacagatctctctttgctcaccctaactcaaacggtgagatgttcggtaggagctggactgctcgagaatcctcgttacattccgttgttgacccctttggaggtcaggtacaggcccaggtccaagcgcaaatctatatgaagtcgcaagccgactctcaagtttcccagtcggactctcagaagcaagtgaatttccaaaccaactttcaacaaattcctcaaaacttcgaaaattccgtccctttggctatgccgatcggtgatgacgactttccagctttagatggcgagaacgcctacattgccctactgcagcaacacagacagttgccagattcaagaccagagcgtgcaaaaccagctcacctaggtcaagaccctttgttccatcccaatatgcacgtctcctggctgtcccaaccagatttgacattttaa

SEQ ID NO: 3706 - DNA, 1089 bp, Artificial Sequence
  Optimized genes for Pichia pastoris
atgctgaaactttatgctattcgtcctattcgaccaattaagccttgcctggttgcatctaccttcagacactattcagttaaagttgacacatcaaataaggctgatgttattaaagactcccaaaccgacaccacatctaaaccaggagcagagcatggacacactttaggtcaatacatcacgaagaagcttatggtgagacaaagattgccaaccgagaagagagatgattcatttctcacccccccagcaatgccccaccatggctacagacaagacttgatggagaaaattcactacgagcacagagaaccaactttaatccgtgacaagctggcgttcggtctgatgagaagcctccgtgtttgtttcgacttcttctctggttataagcatccaaagactaaggagggcctagaaaaattgactccagctacctaccagatgactccagaaaagtggttgacacgttttatcattttggaatcgatcgccggtgttcctggttccgtcgcttccttccttaggcatttgcaatctctgagactcttgaaaagagacaaggctttcatccaaacgctacaggatgaggcctataacgaaagaatgcatctgttgacctttcttgagataggtaagccaggacctttcatgaaggtcttgttgtacgctagtcagggagtcttctgtaatctattcttttttacatacatgttggcccctaacgcatgtcacagatttgtggggtacttggaggaagaggctgtatatacttacactacttgtcttgaggatattgaaagaggattattacctgatatcgaacatttcaaggttccaaagattgccaaggactactggcacctttccgaagatgctaaaatgagggatctgatctcttacattcgcgctgacgaagctaaacacagagaggttaatcatacctttgccaacttgaagttagacggtactgatagaaacccatttgccttgcaagtcgattctgtgcctgaaagtgctcagccgaacaacagactttctactcacaaggccgtaggttgggagcgtgatgaattggtcttgtaa

SEQ ID NO: 3707 - DNA, 1683 bp, Artificial Sequence
  Optimized genes for Pichia pastoris
atgccctcactgctacaggaggacaacgcaaccttcaagttagctagcgaattgccagctttcgaagagttgaaggagttgtacaagtcgaagggaaagaacttttctgctaagcaagctttccaaaaggatcctgctagatcctctaaattttctcatacattcaaaaactttgacggaacggaggtctttttcgacttttctaagaatctcattgatgatgagattttagctaagctatttgacttggcaagacaggctaatgttgaaaagttgagaaatgagatgtttgcaggagaacacattaacgttactgaagatcgtgccgttttccacgtggctcttaggaaccgagccaacagacctatgtacgttgatggtaaaaatgtcgcccctgaagttgactcagttttgcaacacatgaaagagttctctactcaggttcgtgatggaacttggaaaggatataccggtaagcagatcacagatgttgtaaacattggtattggtggcagtgacttgggtccagtcatggttactgaggctctaaagccatatgcccaagagggtttacacgtacacttcgtaagtaacgtcgatggtactcatattgctgagactctaaagtaccttgatcctgaatcgacccttttcttgatagcgtctaaaacttttactacagctgagactattagaaacgctaacaccgccaaagattggttcctgtctaagaccggcaacaagtcagaagctattgctaagcattttgcagccctttctactaacgccgaggaggtcgctaagttcggtattgatactaagaacatgtttggttttgaaaactgggttggtggtagatactccgtctggtctgccatcggattgtctgtggccatctatattggcttcgacaacttcgaggacttcttgaaaggtgccgaagcagtcgaccgtcacttcttggagaccccattggaacaaaacattcctgtgatcggtggtctcttgtctgtttggtatactaattttttcggtagccagacgcacttggtaaccccatttgaccaatacatgcatagattccctgcttacttgcagcagctgtccatggaatccaatggtaaaagcgttaccaagggtaatgtttttgcaaactattctactggaccagttgtgtttggtgagccaacaacaaacgctcaacattcctttttccaattagtccaccagggtacccaccttatccctgctgatttcattttggcagctaagtcacacaatccagttgccaataatgcccatcaaatcttgctggcatccaattttttagctcaggctgaatctcttcttttaggaaagactgaagaagaggttgcagccgccggagctacaggcggactgattccgcataaggtcttctcagggaacagaccaactaccagtatcctgactcaaaagataacccccgctacactgggttccttgattgcttactacgaacatgtcactttcaccgaaggtgccatctggaatatcaactcattcgaccaatggggggtcgagcttggaaaggttctggccaaagcggtgcaaaaggatctccaagacgacagtgccaacgtggaagagtcgcatgattcctccaccgctcaattgatcaagaaatttaaagcttgggcttaa

SEQ ID NO: 3708 - DNA, 768 bp, Artificial Sequence
  Optimized genes for Pichia pastoris
atggctttaactaaaaagccagtcattaagcctatcttcatcagtaacctggatcaaatagagaaggttgagaaagttgagaagactagagagcaagctttgaacgacatcagggaaaagttgaagtcaaacaagcttaagcaagaggagaaggctagagaagagaaggaaaagcaagctaccgttatgagctggagcccatcaccaattgttgctaaaaagtcctcttcatggggctctcagtcttcaggatcatccggatcgggaacggaatcacctgctatcagagattttcgtcgaaaacagagcagagaactttttggtgacttcaaactcaacattccattgaagcaatccaaaagtgcccaatcgattatggttttgaattctgacaactcctctaactcttctaaaagacccagtttcaataagggtcgttccgagtctgtcctgcagtttacagcatctaataacaagttggactctatttggctacataagatgactaccatttccagacaacatagtgtggtatcctctcttgacggtcaggatccaaatgaagaagatgatattatggaagacgttgaacagttccacgtcgtctcaggtaccacaactccattagacatcccttcctcttgtcaccactcgccgggtgattctgagtacttggatgacgccgatttcgttgcagtgtctcccaaatcccaaccaccttccatgtctgacttggccgattactataaccaaaatcagtttctgtaa

SEQ ID NO: 3709 - DNA, 1074 bp, Artificial Sequence
  Optimized genes for Pichia pastoris
atggatagtattcttaccaaccgttgtctgacccctgtctccaatcacgaaacctttaacttggtcggaggttctaaaagcttgacctccgctgagactagaaaaaactctgacgagagatccagtatttcgattccctccccgccactttctccatatcaaagaagcttagatgtcgagagggatcacaagatctttgatgtggtggggagatccaatgatcagatcgtaggtgactttgaagaaccagctactaagacgcagactgaacagttagaagaaggtaagccggatgacgctcccaaaatatcttcttcagtgttgctttctaatcaaactttcccaattaaagatctaactaacgcaaagctaactgtcaatgcctgggcttcaattaattccggtgactccagctttaaagagaaccaactggtcttcttagatagttactataatatcatcgatactagaaaaaagagggcccctagacgtaagtatccaacagctcaacctagaagaagagtatttttctcagcttctgagtcggaaactccaaacgaacgtgttagaacacgtcgcgttattagagacaacgtcaagtactcagactacgagtctgaagttgagatctctcgtccttctacaccaaagaggtcaactaagagagtctcgaagccatctacacctcagcctcaattctactccgactatgagtcaattcctgattacagtccacccttgtcaaccttgcctccaaataacactaaggccctgaaggctgagtggaagggacaaccaatgaacctgtctgacgacccacttgttggtaagctccatcctgcagaggttaccttggcgtccgttctccgattgccatgtaacgtttaccttgattctaagagacgtttgttttctgaaaaagtttctcgatttagattgggcttaccattcagaagaaccgatgctcaaaaagcctgcaaaatcgacgttaacaaggcatccagattgttcgctgccttcgagaaggttggttggttggacgattaccatttccgtaagttcctggacatgtaa

SEQ ID NO: 3710 - DNA, 1335 bp, Artificial Sequence
  Optimized genes for Pichia pastoris
atggtcaagcaggttctgttgctaggttctggtttcgtggccaagccaactgttgacatcctttctgctaataaggatattgaagttacagtagcatgccgaacccttgaaaaggcgaaggagcttgcaggttccgtcgcaaaggctatctctcttgacgttactgatgaggccgctctggacgctgccgtgtcccaagttgatttggtcatctctttgataccatatatttaccatgcaacagttgttaagtcggctataaagaacaagaagaatgtcgtaacaacttcctacatcaacccacagttgaaagctctggagcaacagattaaagacgccggtattgtggtaatgaacgagattggattggaccccggcattgatcacctctacgctgtcaagaccattgacgaagtgcaccgtgctggtggaaaaattaagtcttttttgtcttactgtggtggactgccatccccagaagattccgacaatccattgggatataagttctcatggtcttctcgtggtgttttgttagccttgactaaccaagccaagtactggaaggacggaaagattgaggaagtaagttcagaagaactgatggcatcagctaagccttattttatctacccaggtttcgcttttgtctgttacccaaacagagattctactacctataaagaattatataatattcctgaagccgagactgttattagaggaaccttgagattccaaggcttccctgaatttgtcaaggttttagttgacctgggattcttgaaagaggatgctaacgaaatctttagtaagcctattgcctggaaagatgcattggcccagtatatcggtgctccgtctagctccgaggctgatttggtgtctacgatcgccagtaaagctacttttaagaacgaggctgaccaacaaaggatcatcaacggccttagatggttgggtttgttcagcgataacgcaattacacctagagggaacccactagataccttgtgcgccaccctagaagagctaatgcaattcgaagaacatgagagagacttggtctgtctccaacacaaatttggtattgagtgggctgacgggtcgtcagaaactagaacctccactcttgttgagtacggagatcctaaaggttactccgctatggccaagcttgttggtgttccttgtgctgtcgctgtcgagcaggttctcgatggtaccttgtcaacacccggtttatgggctccaatgacgccagagattaataatcctttaatgaagactttaaaagagaagtacggtatcttcctgactgaaaaaaccctgtaa

SEQ ID NO: 3711 - DNA, 1152 bp, Artificial Sequence
  Optimized genes for Pichia pastoris
atgacgtctaacagaccactgccacttttcgcctctgctgatgtacagaagcatgtctccccgaaggattgctgggttactttgtaccacagaaaagtctataacgtgacagaatttctagaggagcaccctgccggagacgaccttattttggaatatgctgggaaggatattacccagatcatgggtgatcaactgtcccatattcatagtgaaagtgcatacgaaatgttggacgaggacatgttagttggttatctggctacccctgaagaggaaagagaattactttcaaacaaggaccatgaagtcgaggttcaattggattcaaaaggcaatgtagtcgaggtcgacattgatctcaccgaattcggagaattgcctgctgagggtcttttgagcttaaagaccgattacgagcacgacttggttaaacatcagttcctcgacttgaacaggccacttttgatgcaagttttgcgtggttcttggactaaagagttttacctggaccaagttcatagaccacgtcactacggtaagggatctgctccattgttcggaaattttctggagccattgtcgatgactgcctggtggatcgtacctatggtttggctacctgttaacttctactttttttacattggcttcactaaccagaataagcttgtcgctatggccttttggttattgggtttgttcgtgtggactttcttggaatacgcattgcaccgattcttgttccacctggattattacttgcctgaaaaccaaatcgcttttaccatccatttcttactgcacggtattcaccactacctaccaatggacaagtacagacttgttatgcccccaacccttttcattgtcctatgttatcctatcaagactttggttttttctgttcttccatactacatggcctgttcaggttttgctggtggtttcctcggatatataatgtacgatgtgacacactatgttttgcatcactccaagttgcccagatattttcaagagctgaagaaataccatttagagcatcactataaaaattacgagttaggattcggtgttacatctaagttctgggataaggtctttggtacttatctgggtccagacgatgtgtaccaaaagactaactaa

SEQ ID NO: 3712 - DNA, 1086 bp, Artificial Sequence
  Optimized genes for Pichia pastoris
atgaccccaagatcacatattttttttgatatttccattaataatcagcctgccggaagaataatattcgagctgtttaacgacatcgtacccaagacggctgaaaactttcgagctttgagcacaggtgaaaagggtatcggtaagtctgggaagccattgcattataagggtagtaccttccaccgtattattaaagacttcatggtccaaggtggagatttcactaacggaaacggtaccggtggcgaatccatttatggagagaaattcgaagatgaaaacttccaactgactcacgataaaccatttcttctgtctatggcaaatgccggtccaggtactaatggatctcaattttttattacaactgtgccaactcctcatttggacaataagcacgttgttttcggtaaggttatcgctggtaaagccaccgttaggaaaatcgaaagaaactctgagggagaggcgccaatcgaacccgtggtcattgaggactgtggcgaattgccagaagatgctgacttaactattagtgacgaaaccggtgataagtacgaggaggttttgaaggataacgagaacatcgatatcgacgactttgaacaagtttaccaggctattactgagattaaggaacttggtactaaatacttcaagaacggtgatactaagatcgcttttgaaaaataccagaaggcagccaattaccttttggagtacattccttctgatttgtccgaagaacagtcaagcaaacttgagttattgaagacttcggttttctcaaacgtagcactggctggactcaaggtcagtaagttcaaagacacaatcaagtatgctaccttggtcattgaggacgagtctgctgacgcaaaggctaaatccaagggttactacagaagaggctctgcctattcttcactaaaggatgaggactcggccatttccgactttcaaaaggctctagagttgtctccgggagatcctgctatctctcaatccttacaaagaacaaccaaggcccgtaaagatagactcgccaaggaaaaagctgctttgtccaagttcttcgagtaa

SEQ ID NO: 3713 - DNA, 1641 bp, Artificial Sequence
  Optimized genes for Pichia pastoris
atgctatcggcaagacccgtcatcagaagagccgccagatccgccgtggctatcaacgttgccagatccgtcccaagagttgtcagacctctggtgtctagaggctatgctgccgctaaagcagctcctactgaggtttccagcatattggaagaaaagatcagaggtgtctctgccgaggccgatcttaacgagacaggccgtgtcctttccgttggtgatggaattgctcgagtcttcggattaaataactgccaagccgaggagctcgtcgaattttcatctggagttaagggtatggcattgaaccttgagcctggtcaggttggtattgtgctgttcggctctgatagaggtgtcaaagagggagataccgttaagagaactggtaaaatcgttgatgtacctgtgggtccggaattattgggacgggttatcgacgctttgggcaacccaatcgatggtaagggtccaattaattcaaaggtcacttccagggctcaactgaaagcgcctggtattctgcctagaacttcagtgtttgagccaatgcagactggactcaaatctgtcgatgctctagtcccagttggaagaggacaaagagaactgattatcggtgaccgtcaaactggtaaaaccgcagtcgctctcgataccattctgaatcagaagcgttggaacaatggttctgatgagtccaagaagttgtactgtgtttatgttgctgtgggtcagaagcgtagtactgtcgctcagttggttcagacccttgagcagaacgatgctttgaagtattcgatcatcgttgctgccacggcttcagaagctgctccattgcaatacttggctcctttcacagcatgtgctgtgggtgagtggttccgtgacaatggtaagcacgctctgattatttatgacgacctcagtaagcaagctgtcgcttacagacaacttagcttgcttttgcgtcgccccccaggaagagaggcttacccaggagatgttttctaccttcattctcgattgttagaacgtgcggccaagatgtccgacaagctaggtggaggttctttgactgctttgcctgttatcgagacccaaggaggggacgtttccgcatacattccaacgaacgtcatctccattactgacggtcaaatttttttggaagcagaattattttacaaggggattaggcccgccattaacgttggcctgagcgtatctcgtgttggttcagctgcacaagttaaggctatgaagcaagtagccggtagtttgaagctatttcttgctcaatacagagaggtagccgcttttgcacagttcggttcagatcttgacgcctcgacaaaacaaaccttgaatagaggtgaaagattgactcagttgcttaagcaaaagcaatatgccccactggctgccgaggaacaagttccagtaatttacgcaggtgtaaacggtttcttagactctgttccattggagagaattggacagttcgaagaagagtttttagcttacttaaagtctaacgaaaccgaagttctggaagctataagggtgaaaggacaattgtctgacgaattactagccaaattgaaatctgctaccgagagtttcgtcgccacattctaa

SEQ ID NO: 3714 - DNA, 1212 bp, Artificial Sequence
  Optimized genes for Pichia pastoris
atgtccgagggtatcatcgaaatcgataccaatctgatcgagaccaactatgaccaagttgtttccactttcgatgagttgaacctgaaggagcaaatcctcagagctgtgttcgcctacggatacgagtttccatccgcaatccagtctcgcgctatcctgccgattgttgccggtcgtgatgtcttggctcaagcacaatcaggaacaggtaagactgctaccttcgctatttctgctctgcagagacttgacgagaaattaaaggctgcccaagtcttgattttggctccaacccgtgaacttgctctgcagataaaaaaggtggtcttggccctgggtatgcatttgaacatttcggttcacgcctgtattggaggagtcgatccagcgttggatgtaaaggcattcaactctggcgtccaaatagttgtcggcacgccaggaagagtacaagacatgatcgagagaggtgctttccgtacagaaaacgtaaagatggttattttggacgaagccgatgaaatgcttagtaccggttttaaagaacaaatctacacattgttcaccttgcttccctctacgacccaggttgttttgctgtccgctactatgcctcaggaggtcttggaggttactaccaagttcatgaacaacccaattcgtattttggtcaaaaaagaccaactcactctagaaggtattaagcagttctacgtcgatgtgggagaggagcaatacaagttcgattgtttatgcgatttgtatgactctatttcagttacacaagccgtaattttttgtaatactagaagaaaggttgaagagctcacagagagattaactgcacagaaatttaccgtttccgctattcactctgaactatcacagactgaaagagacactattatgcaagaatttcgaactggttcttcaagaattttaatcagtactgacttattggctaggggtattgacgttcaacaggttagtctagtgatcaactatgatcttccttcgaacaaggagaattacatacatagaattggtaggggtggtagatttggtagaaaaggggttgccattaattttgttactagcaaggacgtcgaaatgatgaaggagattgagaagttttattctactcaaatcgacgaattgccttcttccatcaccgatcttttcgaaactgaggaagtgaatgaaagctaa

SEQ ID NO: 3715 - DNA, 801 bp, Artificial Sequence
  Optimized genes for Pichia pastoris
atgctgcttgggttccagagatttcctaaatttcacaccttgacacgtaagtctccaattaactccattcgttctctaagatacaaattccagagacccttgttgactcctttattcctttcccccatcatcaagcaatcaatgaacttggtaactatatccgattctattagagagaatttgattaaacatgaagttattccagacgtcattaaggataaatctttcgttcctaagggtctattgattatttcatacggatcgcctgataaggaggtggtcttgggaaatacgctgaaggtcgaggacgcacagagcatccctaagatcacttttaccgttaatctcaacgaggaacaagagatcgcttcgtttttcgatgagaagttcactcttgtggttaccgatcctgacgctcctagtagaaccgacaacaagtggtctgaattttgtcactacgtcgtctcagacttaagtctctctaccaagtctggtactactgatgctgaagaccaagttaattttactactgatctgaaagttgatacaatcccagaatctgacagcaagacattggttccatatttgggtccaggaccgccaccaaaaactggtttacataggtatgtgttcttgctgtacaagcaaaagcctggtgtctccttggaaggtccagacccaaaaaacagaccaaactggggtaccggaattccaggtagtggcgtttctgattgggccgctaagaattccctgtccttacttgctgtaaacttcttctttgcccaaaacaaggacaactaa

SEQ ID NO: 3716 - DNA, 1038 bp, Artificial Sequence
  Optimized genes for Pichia pastoris
atgacccttagcttactgttgagatctacaaacatctttagagccccaacagctatcgaaactcagactcaaactactccggctttcacagagccacaggttttgaaactaaagcaaaatgttagaaaccccgactcccttgtagcaaacgctgtcaccccagctttcgattggaacactttcgaattcgcaccaatcagagagagtactgtgtcaagagccatgactaagagatatttcgccgatcttgataaatacgcagagtctgacgttgtcattgttggtgctggttccgctggtcttagtgcagcgtataccttgggtaaggcccgtccagatctgaagatagctattattgagtcaaacgtcgccgtcggcggtggttgttttttgggaggtcagctattttctgccatggttttgaggaagcctgctcaccttttcttgaatgacttgggtttggagtacgaagatgagggtgactacgttgtcgtcaaacatgctgcttacttcattaccactctgtgttccaaggtcctggctctgcctaatgtcaagttgtttaatgccacagccgtggaagacctattgactagaaaggatgagaatggacaaatcagaattgctggtgttgtaacgaactggaccctcgtaactatgcatcaccacgaccaatcttgtatggatcctaacaccatcaatgccaacgtcgttttatcagccacgggtcatgatggcccttttggagccttttgcattaagcgaggggttgaaatcggagctgtgaaaaaaatggacggcatgagaggtttggacatgaacaaggccgaagatgcagtggttaagggtgcttcggaaattgcacctggattagttgttgctgggatggaagttgctgagcactctggatccaaccgtatgggaccaacctttggtgctatggctttatctggtgtgaaagctgcagaagaggtcttgaaggttttcgacgagcgtaaaaagcaaaaccaacagtgttatggaggtctctctgcttaa

SEQ ID NO: 3717 - DNA, 4503 bp, Artificial Sequence
  Optimized genes for Pichia pastoris
atgtacaacccgtacgggaacggtggttacggaaacggcatcccacaattccaacaaaacgtataccaaggacaacaacaaccacagcagcaaccacaacagcaagctcagcaacaagcacagtttcaacagccacaacccacaggatttcagcccagttcttccttcggtgtcggtttggttgctcaacagactggtattcagcctcaaggacttcagaataaccctgcaatgtttcaacaacaacaatttcaaccaggtttgcaatctcagcagacagggtttaacgcacaggttattcagtcccagccaactggttattcacaacctacctcatccgccgcaccaacccaaaaaggacacgagttgaaaatcccagccattcgactttctttcattactcagcaagatcaagagaagttcgaacagttatttaaatcttccgtaccacctggagagaacgctattgacggttcaactgcacgtgacattttgctgagatccaacatcccatcttctcaacttgctgagatttggactttgtctgacaccactagaagtggaaagctgttgttcccagaattcgctctggcccttcatttgtgtaacgtggtactccgcggtgaaaacttgccttttgaattgcccaccaccctgaagaacgaggtgtcatctttcgtcgacgttatttctttcggagtcggtgaagaagacgacactcaaaacaacaataccccattttccaacgaccttctctcttctgctcaaacgtcccaacagaatcagcaaaaccagccactatctttccaacagactggtttccagtccagcaaccaagttccccaattgccacaaacttcctttggaaatattggaattcagtcgcaaccaacaggactacaaccagttcctgctcaaaaaaccgggtcgctggtgccagtcgtcactggtggactttctgctcagcaaaccggattccgtccattacaatcccaatctaccggatatcagcctcctttgcagaatcaaacaacgggttatcagttgcctttgcaaaaccaaacaactggctaccaacctccattacaaaaccagactaccggttaccaaccgcctttgcagaaccaaactactggttaccaacagccactacaaaaccaaaccactggataccaagctcctctgcaatcgcaaactactggctataagccacttcaagcccagacaactggattccaacctccacttcaaaaccaaacaactggataccagcaacccctacagtcgcaaaacaccggcttccagcaaccactgcaatctcaaactaccggctaccaaccattgcaaagccaaactacgggatatcaacaacctttgcaaagccagttgaccggtttccaacagtctttgcagtcccaacctaccggtctgcaaccaatgccaactggcaagccaggtcaatggggtttcgttgctactccaactggtggtctaccaggtttggacatgatgcagagtcattttatgcccaactcttcaacccagctgagtcagctccaacagccaatgaatgctcaatctaacaccaatgttccttgggccattacaaagaatgagaagcagatatacgacaagattttcaaggaatgggatcaagatcacaagggatacattgacggtccatctgctatctctatctttggaaagtcaggtcttgccagacaggacttggaaaagatatggaaccttgctgatcaaaacaataggggaaaattgaacaaagatgagttcgctgttgcgatgcacctggtttatagaagactgaacggcttagacattccaaatgtcttgccaccggagcttattccgccctcttccaaaattttgaaagaatcactgaacgatatgaagtccaagttcagacaatccaactttggttcttccagcaataatttgtctaagagtggtagagacggaacacgattcaaaaataacgatgatgatttcggttacaagttgtctatccctgagctcaaaaagctcgtgcacgaaaagcaaatcattttagacgcatatgatagtcaagatactgacgttcaaaaacaatctgatcaattaactcagaaaaccggtcatgatatcgagattttgaaggctaagatcaaaaacatccaatctgaattgaatgaaaagcaacccttcgactccaacgccccaggattgtctaagagagatttgagacaaaggatcgactccttatctgataaggtcagccacataatggaccagatctttaatgttgaagagcagatccagaacgctaagatcgagcaagccagattgagaattgaagaggaaaacccttcaggcgttgagttaaaaggaactggtccaaacggtattatcaccgagtcagacaagagacatgctaagagtagagcaatccttaagagcagaatggcatctttaacgggtaagaccgctccagacatcaatgccttcgaagcaaacgaagagaagttggctgaggaggttgtgagaattaaagctcaaaccactgagggtagatctctgattgaggatgtgcaaaattcgatcaaggatctcaaggattctgctcttaactcattggaagaatctgtttcatcagaggttggttttgagaagtgggaaaagggacagggtgtttcctctaaggaagttaaagagttgattaagttgttaaatgattctaagccaaaggttgctccagtttcagttaaacaagacgtagttgctgagcaagccccttctaaggtcgcttctgtccctgtctcccaagagagcacgggttcaagttccgttgcctccgaaccacatggtaccccagatagttattcctcatacaaaaatcctgctgaccgtgctaagtatattaaggaacaggcagaaaaacgtatgaacgagagactccaaaagttaggtatatccagaaaggccaagagttccagttcgcctcctgttaaccaatccagtccccatgataaggctgctcaatcccctattagatccccagtaggcaacgctcagacttctgaggttattaagaaacctaccgctacatcatctgataataatgcggaacgtttgccagaaaaggagacaccagccaaggagaccgtctcagccaagaatcctgaatacaaggaggaatccagcgacgatgataacgacgaggaacttcgtaagttgatggaagaaaaggctagactagaggaacaacataaacagaaaaagttaaagaaaaaacaagagagagaagccaagttagctgagcttaggaaacaaatggaggagatgagaaaggccgaagaatcagatgacagctgggatgaaaagactccttcacaggtgccaactcagccgcctccacgtgaaacccctgcacaagttcctgttgtcaatatagattctgtcaaatccgttccagagaagcctaaagagatcgtcagagaaccagtccctgttgtgagatcagccacttctagcgagcacaaccctttctctaaacctagcaccgataccgccactcctattcaggtagcctctagtaatccattctttaagccccagcaatcagagccggtcgtcgatcctgtcaaaatcgaggcccagcgtttagctcagagaggggccgtcgctaatgatgacgacgatgactggggtgactcggacggaaacgactcgtccgaaggtgaagctcctacaaggaattcaggtccagcccacctagcttcattgttgtttcgtaacggttccctacctaaggttcctactaccgagtcatcatctgaaaagagagaggtgccagcttcttctcagtcaagtacccttaacctgcagccagaatcgcaggcccagcccacgaagattgagacttccaaggccggttctagtgactctgattccgactctcaatttggtactccaacatctggtgccgctgacgatacattttcgccaccccctattcctgaagcaccaccggtgcctcaagcacctccaattcctcagggtatcgcaccacccccagtccctcagacttccgcgggttcttttagtcctcagattgaggcctcccccgctcaaccaggaatcgttaccaaccactccggttcttctgtaccccctgttccacagacttccgtgcccgctgctcctccatctgcaccacctctgccacaaacttccgctccacctgctccgccagcacctccaattcctcaaacatctgctccaccagccccacctgctccaccagctccccctatcccacaaatgtccgctccacctgctccaccaacaccacagattgctgccccatcggctcctaccccaccagccactttggggggtggtttgtccgccttgcttggtgaaatccaaggcggtaaagctctgcggaaggttgatcccagttctcaacacatctctgagggtactactgtcggtcgtgtcctgtaa

SEQ ID NO: 3718 - DNA, 453 bp, Artificial Sequence
  Optimized genes for Pichia pastoris
atgcaaattttcgtaaaaacactgactggtaagactattactctcgaggttgaatcatcggacaccattgataacgttaagagtaaaatccaggacaaagagggaatccctccagatcagcaaagattgatctttgcaggtaagcaattagaggatggacgtactttgtccgattataacatccaaaaggaatctaccctacaccttgttcttagattgcgtggaggtggcaagaagaagaaaaagaagaactacacaactccaaagaaaattaagcataagcacagaaaggtcaaattggctgtgctgaattactacaaggtcgacgatgatggtaagattgaaaggttaagaagagagtgtgacacctgcggggccggtattttcatggctaatatgtctgacagacagtattgtggtaaatgtcatacgaccataaaattgtccaagtaa

SEQ ID NO: 3719 - DNA, 1842 bp, Artificial Sequence
  Optimized genes for Pichia pastoris
atggccgacggagtcttccaaggtgccatcgggattgatttaggaactacttactcctgcgtggccacttatgattccgctgtcgaaattatcgcgaatgaacaaggtaatcgtgttacaccatcatttgttgcttttactcccgaagagagactgattggtgacgcagctaagaaccaagcagcattgaacccaaagaataccgttttcgacgctaaacgtctgatcggtagagcatttgatgatgagtccgtgcagaaagatatcaaaagctggccattcaaggtagttaacgataatggaaaccctctgatcgaagttgaataccttggcgagacgaagcaattcagcccacaagagatttcctccatggttttgaccaagatgaaagaggtagccgaggcgaagattggtcaaaaagtggaaaaggctgtcgttaccgttccagcatacttcaacgacgcccaaagacaagctacaaaggacgctggcgcaatcagtggtttgaacgttcttagaatcatcaacgagcctaccgccgctgccattgcttacggtttgggtgctggtaagtccgaggaggagaaacatgtgttaatttttgatttgggtggaggaacttttgacgtgtctcttctacacattgctggcggtgtgttcactgttaaagcaactgctggtgatacacatttgggtggacaagacttcgatactaacttgctagaattcttcaagaaagaatttcagaagaagaccggaaaggatatttccgatgatgcaagagctttgcgcagattgagaactgcctgtgagagggccaagagaacgctttcttctgttgcccagactaccgttgaagtcgactctttattcgacggtgaggatttcactgctgaaatctcacgagctaagttcgaggctattaatgctgacctcttcaagtccaccttggagcccgtcgagcaagttttgaaagattctaagatcgaaaagagtaaggtcgatgacgtcgtcctggttggtggaagtacacgtatccctaaggtgcagaagttgctgtctgatttttttgacggaaaacagcttgagaagtctattaaccctgacgaggctgttgcttatggtgctgctgtgcaaggtgccattttgaccggtcagtcgacttccgaagaaaccaaggacttattattgctggacgtcattcctctgagcctaggtgttgctatgcaaggtaacgtattcgcaccagtcgtcccgagaaacactaccgtaccaactatcaagcgtagaacattcaccacagtagatgatcaccaaactacggtccagtttccagtctaccaaggagaaagagttaactgttcggaaaatacactccttggtgaatttgacttgaagaacatcccaccaatgtctgctggcgaacctgttttggaggccatttttgagattgacgctaatgggattttgaaggtcactgccgttgaaaagtccactggaagaagtgccaatatcaccatttctaactctattggaagattgagttcatcagaaatagagaaaatgataaacgacgccgataaatttaaaaaggctgacgaagatttcgctaatagacacgagtcgaaacagaaactcgaggcttatgtttcatcaattgagtctactattaccgatcctatcctatcatctaagcttaagagatctgctaaggacaagatagagtccgcattatctgacgccttggctgctttagaactggaagacgcttctggtgatgattttaggaaggccgaattggctcttaagcgtgttgttacaaaagccatggccactcgttaa

SEQ ID NO: 3720 - DNA, 960 bp, Artificial Sequence
  Optimized genes for Pichia pastoris
atggccacattgctaaaacttaataatggcttgaagttacctcaagtcggacttggagtttggaagattccaaacgaattgaccgcggagacggtttataacgctattaaacaaggttacagattgttcgatggtgcagaggattacggaaatgagaaagaagtaggtcaaggtgtcaggcgtgctatcgatgaaggtcttgtgaagagagaggatctttttattgtgtctaaactctggaacaactaccaccatccagataacgttggaaaggccttagaccgtactttgtcagatctcggtcttgactacttggatttgttctacatacactttcctattgctttcaaatttgtccccttagaagagaaatatcctccagctttctactgtggtgacgggaataacttccactatgaagatgtcccgttactggatacttatagagcactggagagactagttgacgccggtagaataaagtctttgggtgtttccaacttcaatggcgccttgctgcaggacttgctaagaggtgcccgaattaagcctgttgcactgcagatcgagcatcatccatatctggtccaacaaaaattgattgagtacgctcagtctgaggacatcgtggttgtagcatacagctcctttggtccacagtcatttcttgaattgaaggtcaacaaggctttgactgccgtttctttgttcgaacacgacgttatcaagaagatcgctcaagctcacaacagaagtgctggagaggttttattgcgttgggctacccaaagaggtctcgctattatccccaagtcttccaagcctgaaagattgtcgagtaatctgcatattaactcttttgacctgacaaaggaagacctagaaactatctcatcccttgatttaggattgcgctttaacgacccatgggattgggacaagattccaattttcgcctaa

SEQ ID NO: 3721 - DNA, 666 bp, Artificial Sequence
  Optimized genes for Pichia pastoris
atgtccgaaacctacgacgagcaggtggttgctgaacctgtcgaggttcagtacgttgagttatcaaccaagattccagcagatatcagagaaggtgctgaagaaattaagcttttcaacaagtggagttttcaagacgtcactgtaaaggacatatccttgactgattatattcaaatccgtcaaccagttttcgtttctcacactgctggtaaatacgctgctaagagattcagaaaagcacagtgtcctattattgagagattgacaaattcgttgatgatgaacggtagaaacaacggcaaaaagttattggctgttagaatcgtaaagcatgctcttgagatcattcacgtcctgactgaccagaatccactacaagtgttggttgatgccatcgtgaacacgggagctagagaggactctacacgagttggttcagccggagctgtcagacgtcaagccgtcgatgtcagtcccctgagacgtgttaaccaagctattgctcttctcaccatcggagcccgcgagtctgcctttagaaacattaaaagcattgcagagtgcctggcggaagagttgatcaatgctgccaagggttcctccacttcttatgcaattaagaagaaggatgaattggaaagggttgccaaatctaatcgttaa

SEQ ID NO: 3722 - DNA, 1449 bp, Artificial Sequence
  Optimized genes for Pichia pastoris
atgtttgcaagacttcatgctaagagaggatggaaaagcttggcacgtgctcgtgtcggcagtagattcttgagcaattcctcgatcgctcgcgctgctcaaaccaaggataataatgacttctacgatgtcaagaccaaaaagaatgatttctttccagttcaagtcgacggtattgaatcttccctaggtaagtacgaggaattcgctaaggacgcacacgaatgggagtcttggaacttacagaacgaagaccatcctgagtatcctgttaagagaaccaagatcagacatttcactttgaacttcggtccccaacatcctgctgctcatggtgtattgaggcttatattagagttacacggtgaggaaattttgcgttctgatccgcatgttggtttgttacaccgaggaactgaaaaactgatagaatccaagacttatatgcaagctttgccatactttgatagactggattacgtatccatgatgaccaacgagcaagttttctctctagctgtagagaagcttttgaacctcgaggttccagagagaggtcaatacattagaacactgttcggggaaattactagggttttgaaccacttgatgtctgtcctctctcatgccatggacgttggagctcttactccttttctgtggggtttcgaggaaagagagaaactgatggagttttacgagagagtctcaggtgctagattgcactccgcctacgttagaccaggtggtgtgtctcaggatttgcccgcaggactgttagatgacatttacatgtgggcaactcagttcggtgatcgtcttgatgaaactgaggaactgttgactgactcacgtatctggaagcaacgtaccattggaattggtgaagtcacagccgaagatgctcttaactacggattgagtggcgtgatgttgagaggatcaggagtcccatttgatatcaggaagagtcaaccttacgacgcttatgataaagtggatttcgacatcgccgtcggaaccaaaggtgactgttatgacagatacttgatccgtatgactgagtttagacagtcactcagaatcatcgaacagtgctgtaaccaaatgcctccagggccagttaaggttgaagacttcaaagttgccccaccaccaagagctctaatgaaggaagatatggaggcccttattcaccactttttgctatatacgaaaggttacgctgttcctgctggcgaaacatataccgccattgaggctccaaagggagaaatggccgtttacgtggtctctgacggctcggagagaccttatcgttgtaagattagagcccccggtttcgcgcacctgggtgcatttgaccatattgcccggggtcactttttgccagacgctgtcgccatcattggtacaatggacttagtttttggtgaggtggatagataa

SEQ ID NO: 3723 - DNA, 2517 bp, Artificial Sequence
  Optimized genes for Pichia pastoris
atgatcgacgagaagcagctgaaccaaccaaaaagaagtgtcctgagaagactgcacatgctatttttgccccttctagccatttcatttttcttgatttacctttctgacattactcaacctctcttccgtgcgagaaaagaggatgaaaatccattagaaatatacctaaaagcattggaaactaacgaggcccacaaatggtcgaaggtctatacctctcaaccacacttagctggcaccaattacggtttagtggagttcactaagtcaaagttcgaagagtatggttttgaagcttctgttgatgattacgacgtctatctctcttatccaatcgaccactctttggagctttatgaacactctgaagacaagaacgacaaattattgtacaaagcctccctccaggaagatgttctttctgaagatccaaccacctcaggagatgatttgattccaacattcctgggatatggcgctaatggtaatgtctccgcagaatatatctacgccaactacggtactaaggaggacttcgaggacttggttgccagaggtgttcccattaaaggtaaaattgctgtgatacgttatggccagattttccgaggtcttaaggttaagtttgctcaagagtacggagctatcggagctgtgatttactccgatccaggtgacgactacggtattactcctgagaacggttacaagccataccctcatggtaaggcaaggaacccttcctcagtccaacgtggttcagcccaatttttgtcagtttatccaggagatccaactactccaggcgtcggtagtaagaagggtgtcgagagagttgacccacacgccactaccccatccatacctgtattgcccttgtctttcaaagatgccttgcctattcttaagaagttgaataaggagggactgtctgttcctgactcttggaagggtggtttggaaggtgttgattacagtacaggtccagctaaaaatatccatttgaatctttactctgagcaaaactttacaattacgccgatttacaacgtatatggtgagatcaaaggcgaaaacgctgacgaagttattatcattggaaatcaccgcgacgcttggatcaaaggtggtgcttcagatcctaatagtggtagcgccgctctcattgaacttagccgtggtctgcatgctttaacaaagactgggtggaagccccatagaaccattgtgttggcttcttgggacgctgaagagtacgggctcatcggttcaaccgagttcggcgagcagttcgagaagttcctacagaaaaaggtggttgcctatttgaacgttgatgttgctgttgcaggtacacacctgcatctgggagcgtctccatctttgttcaagcttctaaaagacaacgctaaggagatcacttttaagaatagtaccgaaacattatacgataactacgttaaggaccatggaaatgacatcatttctacccttgggtccggatcggactatactgtgttcctggatcatcttggtatcccatccttggatattggatttatcgcaggcaagggtgatccagtttaccattaccatagtaactacgattcctaccactggatctctacttccggagacccgggttttgagtaccataatgttctggctaaatatttgggttctttggtcctaaacctgtcggaaagagaggtcctttacttgaagttgcatgactacgccactgagttgttgaagtatttgttagaagcttacgcccaaatgcctgaagaatgggatgacgaagttataggatttagatcctcctcttgtcatagagctaaggcttctcatcatggtaaggatcctcaccatgagggtagaaggcaccacggaaaaggtttccactccaagggaggtcctcatcacggtgaaagacaccatggtaaaggatttcacgcagagggaggaccacaccacgaaaagggtcctcaccatgagaaagggttacatgttgaaggtgagccacaccaccaaaagggacctcactttgaaaaaggtttccatcacgatatggaaatgtaccataagaagttagctcaccacggtaaggaaccaaagaccaagttgaaacacttgaagaagcaggtcgagagcttgattattgattttgctaacactacccaaacttatgacgcttatactgacttcttgcagaagcaacatgagatcagagatagcctatcgttctgggaaaagatcaagttgcactttaagattaaggccgccaacttcaaactgaagtatttcgaacgtgtatttttgcacgagaacggtttgaagaacagagaatggttcaagcatattgtatacgctgcaggaagaaacacgggttacgctggacaacgtttgcctggtttagtcgaggcaatcgaggataaaaacttgcacgacgccgtcaaatggctgcatatcctttcaaaaaagattgattccctgcagaagtccttagagtaa

SEQ ID NO: 3724 - DNA, 2667 bp, Artificial Sequence
  Optimized genes for Pichia pastoris
atgtctaccgcggctccaattaaagaagagagccaattcgcacatttaactcttatgaacaaggacatcccctctaacgctaagcaagctaagtccaaagtttcagcggcccctgcaaagacaggatctaaatctgctggtggatctggcaacaacaacgccgctcctgtgaaaaaacgtgttagaactgggtgtttaacttgtagaaagaagcataagaagtgtgatgaaaacagaaatccaaagtgtgatttctgcactttgaagggtcttgaatgcgtttggccagaaaacaacaagaagaacatttttgtcaataacagtatgaaggatttcttgggcaagaagactgtcgacggtgctgactcattgaatctcgctgtcaacttgcaacaacagcaaagtagtaataccattgctaatcagagcctgagctccattggtcttgaatcttttggttacggttcaggtatcaaaaacgagtttaactttcaggacctgattggatctaactccggttcctctgatcctactttttccgtcgatgctgatgaagcccaaaaattggacatttcaaacaagaactctagaaagaggcaaaagttgggacttctacccgtgtctaacgcaacgtcccatttgaacggattcaatggaatgtcgaacggtaagtcgcactcattctcctcgccttcaggtactaacgacgatgaactgtcaggtcttatgttcaactctccatcttttaaccctcttactgttaacgacagtaccaacaactccaaccataacatcggcctatcgccaatgtcctgcctcttctctactgttcaagaagctagtcagaagaagcacggtaactcatcccgtcatttctcctacccgtccggacccgaagatttatggtttaatgaattccaaaagcaagctctgactgctaacggtgagaatgcagttcaacaaggcgacgacgcttcgaagaataataccgccataccaaaggatcaatcttccaactcctcaatattttctagtagatcatcagctgcttcatctaattctggagacgacattggacgcatgggtccattctcaaaaggtccagaaattgagtttaattacgactcatttctggagtctcttaaagccgaatcaccgagttcctctaagtacaatctgccagaaacgctcaaggagtatatgaccttgtcgtcttctcacctaaactcccaacattccgacaccttggctaatggaactaacggtaattactcctctaccgtgtctaacaatttatctttgtccttgaattctttctctttctcggataaattttcattgtctccaccaaccatcactgatgctgagaagttctccttgatgagaaattttattgacaatatttctccatggttcgatactttcgataacacaaagcagttcggcacaaagatcccagtcctcgccaagaagtgctcgagtctttactacgccatcttggcaatttcttcacgtcagagggaaagaatcaagaaagaacataacgaaaaaaccttgcaatgttaccaatactcccttcaacagttgatcccaactgttcagtcgtccaacaacattgaatacatcatcacctgtatattgttgtctgtcttccacatcatgtctagtgagccttcaacccagagagatattattgtttccctggctaagtacattcaggcttgtaatattaatggtttcacctccaacgacaagttagagaagtccatcttctggaattatgttaatttggacttagccacctgtgctatcggagaggagtctatggtcatccctttttcttattgggtgaaagagactactgattacaagacaattcaagacgttaagccatttttcacaaagaaaactagtacaactaccgatgatgatctggatgacatgtacgccatttatatgttgtatatttccggtagaattattaaccttttgaactgtagagatgctaaactcaactttgagcctaaatgggagtttctgtggaatgagttgaacgagtgggaattgaacaagcctttaacattccagtccattgttcagtttaaggccaatgatgagtcccaaggtggttcaactttcccaactgtattgttctctaactctcgatcttgctactctaaccaattgtatcacatgagctacattatactagtacaaaacaagccaagactgtataaaatcccatttaccaccgtatctgcatcgatgagttcaccatccgacaacaaggccggaatgtctgcttctagcaccccagcctctgatcatcacgcttctggtgaccacttaagtcctagaagcgttgagccttcattgagtactacactatccccccctcctaacgcaaatggggccggaaacaaattccgtagcactctttggcacgctaagcaaatctgtggtatttctatcaataacaatcataactccaatttagctgccaaagtcaacagcttgcagcccttatggcacgccggtaaattgatctcctctaaatctgaacacacgcagctactgaaactgttgaacaacttggagtgtgcaacaggttggcctatgaattggaagggtaaggagctgatcgactattggaatgttgaagagtaa

SEQ ID NO: 3725 - DNA, 315 bp, Artificial Sequence
  Optimized genes for Pichia pastoris
atggccttatttgatagcatctctaacgttgtgaaggaccaattgaaagataaggaagcctcatccaaggacacatcagctactgaggcttctaccaagggagaagaaccaaagaaaaccgaagaagcaaaaaagcaagagattgagggttacactcaggacctgaaggatattgctgctgctgtccagaagggagatttcaagggtatccaaaaggaggtttccgaattggccggtaataaacagtttcaagctgacgcaaaggagtatgctagtaaagccttctcgaaaaaggagggtggctcttccgcttaa

SEQ ID NO: 3726 - DNA, 1827 bp, Artificial Sequence
  Optimized genes for Pichia pastoris
atgtcttctaagcattgggattacaagaaagatttggttctgagtcacttagctggtttgtgtcagtccaaccctcacgttagattgattgaatccgaacgtgtcgtcatcagtgcggagaaccaagaggacaaaattactcttatttccggtggagggtctggccacgagccacttcacgccggttttgtcactaaggatggtcttttggatgccgctgttgcaggtttcatatttgcaagtccatcaaccaagcagatattctctgccattaaagctaaaccttcaaaaaaaggtaccttaattatcgtcaagaactacaccggagatattctacacttcggactggccgccgagaaagctaaggctgaaggtcttaacgcagagttgttgatcgttcaagacgatgtttctgtcggtaaggctaagaacgggctggttggtagaagaggcttggctggtacttccttagtccacaagattctcggagccaaggcatacctgcaaaaggataatctagaattgcatcaacttgttacttttggagaaaaggttgttgccaacttggtcactattggcgcttcactagaccatgtaactattcctgctagagctaataaacaagaggaggacgatagcgatgatgaacacggatatgaggttttaaaacatgacgagtttgaaatcggtatgggtattcacaacgaacctggtattaagaaatcatcgccaatccccacggtggacgaattggttgctgagttattggagtacctgttgtctaccactgataaggatagaaattacgttcaattcgacaagaatgacgaagttgtattgctgatcaataatttgggaggcacatcagtgttggagttgtacgcaattcagaacatcgtggtggaccaattggcatccaagtactccatcaagccagtaagaattttcacgggaacttttaccacttctttagacggtccaggtttctccatcacattgttaaatgctaccaagacaggtgataaggatattctaaagttcctggatcataaaacttcggcaccgggttggaattccaacatttctgactggtcgggaagagttgacaactttatcgttgccgccccagagatcgatgagggtgactctagttcaaaagtttcagttgatgctaagctctacgctgatttgttggaatctggggtgaaaaaggtcatctccaaagaaccaaaaattaccctttatgacacagtcgctggagatggtgactgcggtgagactctggccaacggttccaacgctatcctgaaagctttggccgagggtaagttagatttaaaggacggagtgaagagcttggtccaaattaccgatatagtagagactgccatgggtggtacttctggtggcctttatagtatttttatttccgctctagccaaatctttgaaggaaaaggaactttcagagggtgcatataccctcactttggaaacaatttctggttctttgcaagccgctttgcagtctctattcaagtatacacgtgctagaactggagaccgtaccctgatcgatgctcttgagcctttcgtcaaggaattcgccaaatctaaggaccttaagcttgctaacaaggctgcccatgacggtgctgaagctaccaggaagctggaagctaagtttggtcgagcttcttacgtcgctgaggaggaattcaagcagtttgaatccgaaggaggcttgcccgaccctggtgctattggattggcggcactgatcagcggaatcactgacgcctacttcaagtcggagaccaagctctaa

SEQ ID NO: 3727 - DNA, 1062 bp, Artificial Sequence
  Optimized genes for Pichia pastoris
atgtccaataacactacccagaatctggctgagcagaagggtatccagaccgatctggttaccttgacccgatttattttggacgaacagaagaagtctgctcccaacgcaactggcgaacttactttgttgttaaattccttgcaatttgccttcaaatttattgcccacactataagaagatctgaattggtcaacttgattggtttagctggagtgactaacgcaacaggggatgaccaaaaaaaattagacgtaatcggagatgagatctttataaacgctatgaagggttctggtaacgtcaagttgttggtctccgaagaacaagaggacttgattgtcttcgagtcttcgaagggtaactatgctgtggtttgtgatccaatcgacggttctagtaacttggacgcaggtgtcagtgttggtacaattttcggtgtttacaaacttctaccaggctcagcaggatccattaaggatgttctgagatctggtaccgagatggtcgccgctggatacactatgtatggagcttcttcacatttgatgctcacaacaggtaatggtgttaatggttttactttagatacggatctgggtgaattcattctgacttacccatccttgaagatcccacacacccgtgccatttacagcatcaatgaaggtaacagtcattactggactgatggcgttaatgagtacattgcctcacttaaaaagccgcaagctaacgggaaaccttactccgccagatatatcggttctatggtcgctgacgttcatagaaccttgctgtatggcggaatcttcggataccctgctgactcaaagtccaagtctggtaagctcagggttttgtatgagtgcttccctatggccctattgcttgagcaagcgggtggtgaagctgtgaacgataaaggagaaagaatcttaaaccttgagccaaagcaagtacacgagcgttcaggaatttggcttggaagcaagggtgaggtggaaagactactcccttaccttactaagaaaattaagattcaatctgttaacctgtaa

SEQ ID NO: 3728 - DNA, 1095 bp, Artificial Sequence
  Optimized genes for Pichia pastoris
atgaaggccttgattttagttggtggatacggaacacgtctacgacctctgactctttctgtccctaagcctttagtcgagttcgctaataagcccatgatttttcaccaggtaaaggctctggcagaggctggtgtcaccgacatcgtcctggccgtcaactacaagcctgaggtcatggtaggggctttgagagaatatgaaaaggaatgtggtgttaatattacttttagcgtggaagaggaaccacttggaactgctggtccattgaaactggctgagagtgttttaactaagaacgacgagcctattttcgttctcaattccgacgtgatctgtgactacccatttaaagatcttgctgccttccacaaggcccatggcgcagaggccaccattgtggcaacaaaagttgatgagcccagtaagtatggagtcatagtgcatgatagagacattccaaacttgatcgatagatttgtcgaaaaaccagttgagttcgttggtaaccgtatcaacgctggtatttatatcattaatccatcggtgatttccttgatcgagatgagacctacttcaatcgaaaaggagaccttccctctgctagtcgagaaaaagcaattgtactcttatgatttggaaggatactggatggatgtcggtcaaccaaaggatttcctttcaggtacttgtctctacttgtcctctttggccaagaaggagagatcagcacttactcccacctctgaaccgtttatcaatggtggtaatgttctaatcgacccaaccgccaaggtgggcaaggactgtaaaattggtccaaacgttgttattggaccaaactgcgtcatcggagacggtgtaagaatacaaagatctgttattttgaaaaactccaatatcaaagatcatgcttgggttaagtctacgattgttggttggaactctactgtaggaaaatgggcgaggttagaaggcgttacagttttgggtgaagatgttactgtcaaggatgaaatttacgttaacggtggtaaggttttgccacacaagtctatttccgctaacgttgacacccctcagattatcatgtaa

SEQ ID NO: 3729 - DNA, 1098 bp, Artificial Sequence
  Optimized genes for Pichia pastoris
atgaaaattgtactggttttgtactctgccggtaaacacgccgcagatgagccaaaactatatggctgcattgagaacgagttgggtatcagacaatggctggaaaagggtggtcacgaattggttactacaagtgacaaggaaggagagaacagcgagctcgaaaaacatatcccggatgccgatgtcatcatttccactcctttccatcctgcttacattacaaaagagcgtatccagaaggccaagaagctgaagctcctggtcgtcgctggagttggttctgatcatattgatctggattacattgagcaaaatggtttggacatttcagtacttgaagtcaccggttccaatgtggtgtctgttgctgaacatgttgttatgactattcttaatttggtcagaaactttgttcctgcgcatgaacaaatcgtgaatcacggttgggatgttgccgccatcgctaaggatgcttacgacatagaaggtaaaacgattgctactattggtgctggacgtatcggctatagagttttggaacgtttagtggctttcaatccaaaggagctactttactacgattaccaaggcttgccaaaggaggccgaggaaaaggtcggtgctagaagagttgacactgtcgaagagttggtagctcaagctgacgtagttacagttaatgcccctttgcacgcaggtaccaagggattggtgaacaaagagttattgtccaaatttaagaagggtgcttggttagttaacactgccaggggagctatatgtaacgctcaggacgttgccgacgctgtcgcatcagggcaactaagaggttacggaggtgacgtttggtttccacagcccgctcccaaggaccacccttggagagatatgcgaaacaagtatggatatggtaatgcaatgaccccacactattctggaaccaccttggatgcccaggttagatacgcagaaggtactaaaaacatccttaactcgttcttaactaagaagttcgactatagaccacaagatgtcattttgcttaacgggaaatacaagaccaaggcttacggaaacgacaagaaggtcgcataa

SEQ ID NO: 3730 - DNA, 747 bp, Artificial Sequence
  Optimized genes for Pichia pastoris
atggctagaactttcttcgttggtggtaactttaaaatgaatggttcgaaaaaatctattcacgagatcatcgagcgtttgaataacactaaattgcccgagaacgttgaagtagtcattgccccacctgcgccttacttgcaacaagctgtgaccgaaaacaagcaaaagactgtttacgtttccgctcagaactctttcgataaggctagtggagcttacacaggggaagtgtccgtcgaggccctgaaggatcttggagttccatatgtgattttgggtcattctgaaagaaggaccatcaacaaggaggatgacgcttttattgcttctaagaccaagtttgctttagatcagggacttaaggttatcttgtgtataggtgagacgttggaagaaaaacaagccaacattacactggatgttgttaagcgtcaactgcaggcagtcgttgatgtagtatcagactggactaacattgttgtggcatacgagcctgtttgggccattggaaccggcttggccgcaactccaagcgacgcccaagacgtccacaaacagatcagagatttccttgctactgtcattggtaaggaccaagctgaaaaggttagaattctatatggtggctccgtcaatggaaagaatgcagtcgagttcagagacaaggccgacgttgatggtttcctcgtcggtggtgcttctttaaaaccagaatttgtcgacatcatcaattcaagaaactaa

SEQ ID NO: 3731 - DNA, 1029 bp, Artificial Sequence
  Optimized genes for Pichia pastoris
atgatcgtccatagtcccatcgttaccagaagattggctacctcggcaagagttccaatccgtacactagctacttcctcaaacggcttgaactttttccaaaagacacagttacctgctaataccattatccgattcgtaccacaacaaaccgcatggattgttgagagaatgggtaagtttcacagaattttgcaacctggtcttgctatcctcttgccattccttgacaaaatccaatatgttcaatccttgaaagagaacgccattgaagtcccatcacaatctgccatcacttctgataatgttactcttgaaatggatggtgtcctttacatacgtgtagttgacgcttacaaggcttcatatggtgtggagaacgccgaatacgcaattagccaattggctcaaactactatgagaagcgaaattggacaattgactctggatcatgtcttacgtgagagacaatctcttaacgttaacatcaccgctgtgctgaatgatgcagctaaggattggggtattcagtgtctgagatacgaaatcagagacattcaccctccttccaacgtgttggaagctatgcacagacaggtttcggcagaacgcagtaagagggctgagattttggattccgagggtcataggcagtctgctattaatatagccgagggagagcgtcagtctcaaattttggctagtgaagctacgaaatttaagcagatcaacttggcagagggtgaagccagagctatcctgttgaaggccgaagccacatccaagggtattgaacagattgctaacgctatcagaaatactccaggtggcggagatgccgtttcactacaggtcgctgaaaaatacgtcgacgccttcggtaagctcgcgaaagagtctaataccattgtcataccggccggactgggagacgtttcctcttggatggcttccgggttatctatttatcaaaatttacagaagtctaacgccactaaggaccaaaacaaaattgaggagactaagtaa

SEQ ID NO: 3732 - DNA, 1548 bp, Artificial Sequence
  Optimized genes for Pichia pastoris
atgagcttggttcaggaactaattcaaaagattagttcattagaacttacacttgttgaaaagttgtctatcttgttcgtcgcacctttcctcttgaacgccttgtggcaattcatctacagttttcgtaaagacagggtccctctggtattccactgggttccatgggtgggttctgccgtcacctacggaatgcagccctacgaattctttgccgactgtcaaagaaagtacggtgatgtgtttgcttttgttctcttgggtaaggttatgaccgtttaccttggaccaaagggtcatgagttcattttaaatgctaaactgaatgacgtgtgtgctgaggatgcgtataagcatctgacgactccggtcttcggcgagggtgttatctatgattgtccaaactggaaattgatggatcaaaagaaattcgttaagggatcgctaaccaaagaatctttcagatcctacgttccaaaaattcgcgatgaggttttggactacataaacaacgatccaaacttcatgggaggtgactctaagaagaaaactgggaaaactaatgttttgaactcacaatctgaactgaccatcctaactgcttccagaagcttgttaggtgacgacatgaggaaattactcactaagaagtgggctaagttgttctcagaccttgataaaggtttcactccattgaatttcatcttttctcatctacctttaccttcctattggacacgtgatcatgcacaaaagaccatttctgaaacctacttgtccctgattaataagagaagagctacgaacgacattggcgacagagacttgatcgacagtttaatgaaatcctccacttacaaggatggttcgaagatgactgatgaggagatttctcacttgttgattggggttttgatgggaggtcaacatacctctgcttccacaagtagctggtttctgttacacttgggtgagaagcccgaattgcaggaggaacttttcgaggaacaggaaagagtccttcaaggaagagaacttacctatgacgatctggctaatatgccattgcacaaccaggttattaaggagacccttcgtatgcatatgccgctgcactccatttttagaaaggttactagaccactaccagttcctaattcaaagtatgtagtcccaaagggccactatgtcttagtatctcctggttttgctatgacaaacgacgcatactttccaaacgcttcagattttcaaccacacagatgggatgagacagtcgagcctgtctcagccgacgccaaggagactgtggattatggtttcggtaaggtctctaagggtgtctcgtccccatacctgccatttggaggtggaagacatcgttgcataggtgaacactttgcctactgtcaattgggaaccatcctcaacactttcgttcgtacatttaagtggaaagctgtggtgcctcagcctgattacacttctatggtaaccttgcccgaacctaacctttctactatcacttgggagagacgagataactaa

SEQ ID NO: 3733 - DNA, 1671 bp, Artificial Sequence
  Optimized genes for Pichia pastoris
atgactttgtccaacaacactaagagacgtgagtcttctattactccagatcaacaaaagttgatagagaagtatttggaaaagaaaaacgtccaccaccaaaagaagctgcaacatgttacacatacttctactaacgtcaacctatcatccattaaatggaagtctttgagattagaagattgtggagtgtctattcctgactccggtttgcctgctaagattgcatacgagtctatccacgattctttgaatttggacggcaatccaactcttaacttggcctctttcgttaataccggatacattaacgactattcagaaccgctgattcacgaaaatttggttaaaaacttagctgataatgacgaatatccagttatgttagaattacacgaaagatgtttgcagatgttgactgagttgtggaatggcgactcaaagaagtccattggttctgcaacaacaggtagttccgaggccatcatgttgggtggtctagctatgaaaaaaaactggcagacgaagcgaagagctgctggtaagtctacggagaagcctaacattatcatggcctcctgttgccaggttgcgctagaaaaatttgctaggtactttgaggtcgatgcccgtattatctcatgcgataacaatgactacatcttggactacgatttgatttacgatgcatgcgacgagaacactattggtatcttcgtgattcttggtagtacttataccggtgctttcgaagacgttgccttggtcaacaagatcctagatagagtagaaaaggagaaaggatttgatatccccattcatgtcgatggcgcctccggggctttcgttgccccattcatctatccagacctggagtgggacttccgtgttcctagagtaaagtccatcaacacctctggtcataagtttggtctggttactgccggactgggttggatcgtttttaaggacaaagaatggcttccaaaagatctcgtcttcgagcttagatatttaggaggtctggaatattctttcacacttaacttctcaagaccaggacaccaagtgatacaccaatacttcaattttgtggctttgggtaaaaatggatactctagcatctttgacacctgtttgaccaacgctcgtctcctcagtagttttctggaagagaccaattactttaaggtcgtctcgaatgtacatagacctgttgaagcaggaactactccccacgctgacgaccacttggctttccatccctccctgccagttgtgtccttccaatttaacgaagaattctctaagcaataccctgagatcccacagtcaattatttcgaccttgatgagaaacaaaggttggatcatcccaaattaccctttgcctagaaccaccaagccagttaaggacgatgagcgcgagattctaagagttgttgtccgttacaatttaaccctggaattgcttcagaagttaatgagcgacattgtctcaacattgactgtattgacaaacagctgtaagttaataagggagtctctcaacaacgatgctcttgaggatactgatattatctacgatatgcttctttccattgcactggacggtagtgagaaccttgttaaatcgtctattaaggatcataagcatgccggtgcttgttaa

SEQ ID NO: 3734 - DNA, 1140 bp, Artificial Sequence
  Optimized genes for Pichia pastoris
atgtcgacggagggacagatcatcaagtgcaaggccgcagtagcttgggaagccggtaaggacctgtctatcgaagagattgaggttctacctcccagggcacatgaagtcagagtcaaagttgagtttaccggagtctgtcacacagacgcttatactttatcgggtgccgacgctgaaggatccttcccagtagtatttggacacgaaggtgccggcgttgttgaatctgttggagagggtgttgagtcagtgaaagttggagatagtgttgttttgttatacacacctgagtgcagagagtgtaaattttgtctatctggtaaaactaacctctgtggtaagattagagctacccaaggtaaggggcttcttccagatggcacttccagatttagatgtaagggtaaggacctttttcattacatgggttgctcttcattctctcaatacactgttgtggctgacatttctgtcgtcaaggtgcaagacgaggctccgaaagataagacctgtttgttgggttgtggtgttactaccggatatggtgcagctatcaacaccgctaagatctctaagggtgataagattggggtcttcggagctggctgcatcggtctgtccgtcatccagggagcagtgagtaagggcgcctcagagattattgttattgacatcaatgatagcaaaaaggcctgggctgaccaattcggtgccacaaagttcgttaaccctacgactttgccagagggaactaatattgttgactacttgattgacattactgacggtggttttgattatactttcgactgtaccggtaacgtccaagtgatgcgaaacgctctggaatcctgtcataaaggttggggtgaatcaatcatcattggcgttgcggcagctggaaaagaaatatccactagaccattccaattggtcaccggtcgtgtctggagaggttgtgccttcggaggtatcaagggtcgtacacagatgccatctttggtccaggattacttggatggtaagattaaagtagatgaatttattacccaccgtcatgatttagataatattaacaaggctttccatgatatgcacgccggaaattgtattagagctgttataactatgcactaa

SEQ ID NO: 3735 - DNA, 399 bp, Artificial Sequence
  Optimized genes for Pichia pastoris
atgtcggaaacttctgcccctcgtccaaccattgtcaaaaagtatactaagaaattcaagagacaccattccgacagataccaccgagtcggtgaatcctggagaaagcagaagggaatagattcttgtgtcagacgtagatttagaggtactattagacaaccaaagattggttacggatctgataaaagaacaaaatatatgttgaagagcggtcacaaagctttcgtggtaaacaacgctaaggaactggacgttttgttgcttcataatcaacaatacgctgccgagatcgctcatgccgtttcaagtaagaatagagttcacattctagcacgtgcaaaggagctgggcatcaaggttaccaacccacagggtaggttgaacttagaggcttaa

SEQ ID NO: 3736 - DNA, 651 bp, Artificial Sequence
  Optimized genes for Pichia pastoris
atgagccaaggtactatttacttggttttggcctcaccaagatcttctttgttcaaggatttgatagaatactacggtctcgatatcaaaatctccgacacatctgacccagaatttgctaagactttccctctgaagcgtactccatcgtttaaagggccagactttgttcttcatgaagctttggctatttttgtttacatcacgtctctgattccccaaaaccatggattatacggaagttctaatcttgattatgctcaaactattaaatggctgtccttcacagcttcagagattatctccggtttggtccaggcattgtatcctctaatcggcaacctgccatactctaaggatggagttgatcaggccttgaaggatctcgagagttacgtggcagtgtatgagacccaattgaagcaaaccaagtaccttgtcggtgataagattaccctggctgatctattcgccgtacagtccattagatggggtttacagtatatttgggacgtcaattggttaaaacaacaccctttgatcgacgcctggttcaaggacgttactcaacacccaattatcgtcaaatcacttggtgacttcaagccattgcagaaggctttaccgaacgctcctcccaaaggtaactaa

SEQ ID NO: 3737 - DNA, 1233 bp, Artificial Sequence
  Optimized genes for Pichia pastoris
atgatttttgacggcactacaatgtctatcgccattggtttactctccacattgggtatcggcgccgaggctaaagttcattccgctaaaatccacaagcaccctgtctccgaaaccctgaaggaagctaattttggtcagtacgtatcagctttggagcataagtacgtttctttattcaatgaacaaaacgccctgagtaaatctaactttatgtcacaacaggatggttttgccgttgaagcttctcacgacgctccactgactaattatttgaacgcacagtactttaccgaggtgtcactgggaactccccctcaatcattcaaagttattcttgatactggatcctcgaacttgtgggttcccagtaaagactgcggtagtctagcttgtttcttgcatgctaagtacgaccacgacgaaagctccacttataaaaagaacggatccagttttgagattagatatggttcgggttctatggaaggatacgtttcacaagatgttttgcaaattggtgacctgaccattccaaaggttgactttgccgaagctacctcagaaccaggtttggcatttgctttcggaaagtttgatggaatcctagggttagcatacgactctatctccgtcaacaagatcgttcctccaatttataaggctttagaattggatttgttggatgagccgaagttcgctttctatctgggtgatactgacaaagatgagtctgacggcgggcttgccacgtttggtggagtagataagtcaaagtacgaaggtaagataacttggcttcctgtcagaagaaaggcatactgggaggtcagcttcgacggtgttggacttggttccgaatacgcagagcttcaaaagacaggagccgccattgacactggaacgtctttgattgccttaccttctggtctcgccgagattctcaatgccgagatcggcgcgaccaaaggatggtcgggtcagtacgctgtggattgtgatactcgtgactctctgccagatttgactttgaccttcgctggttataacttcaccataacaccatatgattacaccttggaggtctctggttcttgtatttccgctttcactccaatggacttccctgagccaatcggtccactagcaattatcggtgattctttcttgagaaagtactattctgtctacgatcttggtaaggacgctgtgggtttggctaagagcatctaa

SEQ ID NO: 3738 - DNA, 804 bp, Artificial Sequence
  Optimized genes for Pichia pastoris
atgcttactcacaccgttttgcgtgcagggactaaaagaacttgtagtactctttctgtagttcgtggtctcgctacagtttctcaaaatcaaccaaggctaaagtccttcaaggtctatagatggtcccctgacacccccgagattaagccacatatgcaagaatataagatcgatctgaacgagtgtggtccgatggtcctggacgccttgttgaaaattaagaatgagcaggacgctaccttaacttttagaagatcatgtagagaaggtatttgtggttcttgtgccatgaacatcggtggacgcaacacattggcctgcttgtgcaagattgaccaaaatgagtctaccgagttaaaaatatacccactgccccacatgttcgtggtcagagatttggtccctgatctcactcacttctacaagcaatataaatctatccaaccatttcttcagagagactcggttccatccgacggcaaagaaaacttgcaatctatcgaggatcgaaagaagctggatggattatacgaatgtattctatgcgcttgttgttccacgagttgtccatcttattggtggaaccagcaggaatacttgggtcctgccgtgttgatgcaagcttaccgttggcttatcgactcaagagatcaggctagcgttgctaggaaggagatgttacaaaattcaatgtccttgtaccgttgtcatacaatcatgaactgcgccagaacctgtcctaagggactgaacccaggtaaggctattgctgaaattaaaaagcagttggcatttgattaa

SEQ ID NO: 3739 - DNA, 1212 bp, Artificial Sequence
  Optimized genes for Pichia pastoris
atggccggtgctaccagaatcaactcacgagtagttagattcgcgatttttgcctctattttggtcctgttgggattcattttaagtcgtggtagcgctacatcctactcactcccgtcaggcttgacatcagacacatctcaatccactggttcctctccaaagagtgagtccaagccctcttctcagggatcctctggtgcaactgagcttaagaagacttacaccactgatggaaaggaaaaggccacctttgtttctctggcccgtaactccgatgtatggtctttagcctcatcgatcagacacgttgaagataggttcaatcacaaatttcactacgattgggtgtttttgaatgacgaggagttttcggacgagttcaaacgcgtcaccagcgcacttacatcaggtaaggccaagtatggtttgattccaaaagagcattggtcttttcccgaatggattgacaaagaaagagctgctaaaactagaaaagaaatggccgctaaaaaggtcatttacggagatagtatttcttatagacatatgtgtagattcgaatctggtttcttcttccgtcacgagttgatgcaagagtatgaatggtactggagggttgaaccagacattaagatttactgcgacatcgactatgatgttttcaaatttatgaaggacaacaataagatgtacggatttaccgtgtccctacctgagtacgtcgctaccatcgagactttgtgggacactactagagctttcatcaaagaaaacccacaatatcttcctgaggacaacatgatggactttatctcggatgatgacggactgagctataacggttgtcacttctggagtaacttcgaagttggttctttgtctttgtggcgttccgaggcttacctcaagtactttgatcatttagacaaggcaggaggttttttctacgaaagatggggtgatgctcctgttcactcaatcgctgccgcactattccttcatagagatcagatacatttctttgacgatgtgggctatttccacaatccatttaacaactgtccagtcgatgctgacctgagagaagaaagaagatgtatgtgcaatcctaaggatgattttacctggaagggttactcttgtgtccctgagttcttcactgttaacaatatgaagcgtccaaaggggtgggaggctttttccggttaa

SEQ ID NO: 3740 - DNA, 612 bp, Artificial Sequence
  Optimized genes for Pichia pastoris
atgaactctgagtacgattatttgttcaagttgcttttaattggcgactctggtgttggtaagtcctgtctcttgctgagattcgccgaggatacctacacgcaggactacatcagtactattggtgtcgattttaagattcgtactatcgaattggatggtaagactatcaaacttcaaatttgggacaccgctggacaagaaagattccgtaccattacttcctcctattatagaggagctcacggtattattatcgtctacgatgttactgatcaagaatcttttaataacgtgaatcaatggctgcaagagattgatagatacgcaaccggaggagtcatgaaactgcttgttggtaacaagtctgacctaaaagacaagaaagtcgttgactacaccgtagcaaaggagtttgccgatgctttagaaatcccattgatcgaaacttcggccttggactcaacaaatgttgagcaggctttctttaatatggctaggcagattaagtcacaaatggttaacaaccaggccggaagcggtacagagaaggcttctataaacttgagaggtcaatcagtggggggtagtcagaactcctcttgctgttaa

SEQ ID NO: 3741 - DNA, 1131 bp, Artificial Sequence
  Optimized genes for Pichia pastoris
atggacggtgaagacgttgccgccttggtcattgacaatggttctggtatgtgtaaggccggttacgctggtgatgatgctcctcatactgtatttccttccgttgtcggacgtcctagacaccaaggtgttatggtcggaatgggtcaaaaggattctttcgttggagatgaggcacagtctaagagaggaatcttgacactcagatacccaattgaacacggtatcgtaaccaactgggacgacatggagaaaatttggcaccataccttctacaacgaattacgtttggctcctgaagagcatccagttttgttgactgaagcccccatgaatccaaagtctaaccgtgagaagatgacgcaaattatgtttgaaacatttaacgttccagcgttttacgtaagtattcaggctgttctgtctctttacgcttcaggaaggaccaccggtatcgtccttgactctggtgatggggtgacccatgtcgttcccatctatgcaggattctctttgccacacgcaattctgaggatcgacttggctggtcgcgacttgacagactatctcatgaagattctttcagagagaggatacaccttctctacctccgctgaaagagaaatagtgagagatatcaaagaaaaactatgttacgtggcattagatttcgaccaagagcttcaaacatccagccagtccagctccattgagaaatcttacgaattgcctgatggtcaggtcataactattggcaatgagcgatttagagctccagaggccctgttccatccgtcagtgctgggcttggaagcttctggtatcgatcagactacttataactccatcatgaaatgcgatgtcgacgtcagaaaggaattatattcgaacatcgttatgagtggtggaactactatgttccctgggatcgctgagcgtatgcaaaaagagttgactgccctggccccttcttcgatgaaggttaagatttctgctccaccagagagaaagtacagtgtttggattggtggttccattctagcttcccttggtactttccaacaaatgtggatttcaaagcaagagtatgatgaatcaggcccatctattgttcacttaaagtgtttttaa

SEQ ID NO: 3742 - DNA, 549 bp, Artificial Sequence
  Optimized genes for Pichia pastoris
atgtcaggtggccctgtccccgttttcaaaaagtacactaccggttctaagggtatatgggaaaagatccgtcaacttttgactttagttccaaaccgttccacaggtaatccattggtgaagaattatcgagttccacctcctggtagtcaaacgttgaagtacaaggaccccgttactattcctgctggagacattgtcaagaatcaatactatgatagagatcacaggagaaactacccaagactcgtcgctttcgaccagaccaaagtaagtggtcttttgaccttaggatcggcccagaacccaagaatctccgtaggagagaaaggtcagaaggaacttgctgttttcgaccaatccgtctctctgtcttctacattggcaaccattgatcctaaggttgtcaaatctgagttgctagccgaaggaggttcaccagtggttgctcctagcctgaacaaaaagatgaagtttagactgactgaggagtccgaacatgggatgtatccagaggattacccgatcagaatttttgctcaaaactaa

SEQ ID NO: 3743 - DNA, 435 bp, Artificial Sequence
  Optimized genes for Pichia pastoris
atgtccgacgtcgaacagcaagttgtcgaagaggtggaggtcgctgtagaggaaacttctgcatctatttctatcgaggatgcagtgaaaaaggttttaagaatctccctggtccatgatggtctggctagaggattgagagaagctagcaaagcccttagttcaggtgctgctcaattgtgcgttctgtgtgactctgttaccgacgaagctattataaagttggtcgaagctttgtgtaacgagccagaggagaaaattcctctcatcaaggtttcagacgccaagcaattgggcgaatgggctggtttatgtacacttgatagagaaggtaatgcccgtaaggtagttggtgcctcttgtgttgttattaaggactggggacaggattcggaggagaggcacgtgttgctagattacttctcttccaactaa

SEQ ID NO: 3744 - DNA, 2271 bp, Artificial Sequence
  Optimized genes for Pichia pastoris
atggttaacgttaagttcgaggattattcgtcactgttggaatccttggaccagaacattgaccaggccaacagaagagaagacccttttgctaaacagatgcagggtgttaagccaagactttccacaatgtcatactcgtccgctggatcctatacgccagattcctctccagatatgattttcaaccaagagcagtacaatgaaaaccagtttaacgagaacatgttcaataacgacttgtacagtactctttcagagttgcctgagttatctaacatgtcgtcctcaatgtccggaacttctgagaacaattccccacactcgactgaattgaatgacttgggtatgcttaatggtatcaatttcggatcttccgccgacacgaacaacaccgtcgggagctctgtaaatactacaataggagatcaagttttgttgcccgttgtcgatatggagcgcaacgatgccatcgccgcctctgcagcccaccagtcaattaaggattcaaaagtcgctaaaccacgaaagaaaatgaagtccagtcataatttgatcgagaagaagtatagaacgaacatcaacagtaagattcttgagttgagaaattgtgtcccaactttgcgtatcgtcatatccagaaacggtggcggtaactctggtgatgagtttagtaaggattacgaaggtttgggatatagcgacgacgagtctaagttggatggtctacagcccgctcgtaagttaaacaaggcaactattttagccaaatccgttgaatacattaagcatttagaatatcgtaattccctcctgactacagagaatgaaaaattgaaagagattatccaaaactctggtgctgctaccgacagtggatctggtaacatgatgaacaagttgatcattggctccttagcatgtctggcaggtggttctaccttgaacgacatgagcaacgatagcagatctcttatgacaatgcctattttcatcttcaactcgaatgaaactaccctagctttgaagccattgttgggtattgttaagggttttctggccatttacgtcctttatcttgtaattgccccgctgtttcattcaagtaccgtttgtatcgaaaaggacgaaaaaactatcgctaacgagaacaatgagtccccagattggccacaaggaaagcagggaggttttttctctttactcgtgaatattgctacatctggactttcagtggctctgaacagagatccatacgctcctatgatgcaagctttttacttcaagcaattgtctttgtacggtaacggcagttctctagcctcttacattgcagcttcgtactggagatgtgcaagacaaagtagaaatcaaattccagctactgattctaaatcccagtacttattggaaaactttgaatacgcgcaagtgtttgagatcaaatctatgaacactttgctagctaagtatcctaatctcaagttgaaccgtactcacttcgttgaacaggtgtctaagttgttgtgtgactccctattagagaactgcattcataagatgatcgaactcgaagctctgaaattgcaaaagaaggaacaattagctgctgatgatactgagcaggaagagcaaaccgagcgtaccatctctgaattccaagagcaacgtgaccaatacttgaagcatgcctctcagctttcatctactaatgagcaattgttaaaatgcaaacttattaagtgtatgattgacacctctctcgagaacctgcaagaatgcggcagattaattcaaactttcacatctaacaagctgtccaaagatttggtagcatgctttacctgttgtattatctgtgccctgtcagagggtagtccctcaatcgaacaagtcaaccttttcattgacaggcttaatctacctaactataccaatgtttacgtcaagaacactaaggtgtcgttgttgctttatgtttctctgttaaccatggttaattctttgcctgattcaacttactcacaaagattcgtccaagttgattccgatagcgacgaagaagatgctcttgactccgattcagtcggttctggttcttacgacaatcacctcgttagagacaagctgaccaatatcttgtctaacctgagaattattaccggaactcctaaatccaagaacgacctggctataatcgagagcacaaccctgaaatcaatattgatcgacggtttggtttctaggattaatctacttgaccacgcttaa

SEQ ID NO: 3745 - DNA, 333 bp, Artificial Sequence
  Optimized genes for Pichia pastoris
atgcctgcaccctacgagaagggttcagagaaaaaaggagctaccctgttcaaaacccgttgtttgcaatgccatactgtggaagctggaggtccacacaaggtcggtcctaaccttcacggtgttttcggaagaaagagtgggctagccgagggttactcttatactgacgccaacaagagaaagggagttgagtggtccgaacagacgatgtctgattacttggaaaacccaaagaagtatattccaggtaccaaaatggcttttggtggcttgaagaaggccaaagacagaaatgatctcatcacatacttagctaaggctactaagtaa

SEQ ID NO: 3746 - DNA, 1506 bp, Artificial Sequence
  Optimized genes for Pichia pastoris
atgacttttgcaccacctttggaatttgaaattgatttgccaaacggtcttaaatacacacagccattgggtttgttcatcaacaacgaatttgtggagggagtggaaggaaagctactcccagttatcaatccctgtgatgagactaaaatcacccaagtttgggaggcttctgcagctgacgttgatagggctgtcgatgccgctgaggacgctttcaacaactcagtatgggctactcaggatccgcttgaaagaggtaagttaatgaacaagttggctgacctaattgatagagacttcaacatcttggccggtatcgagtcgatcgataacggtaaggcctacacatctgcccaaggagacgtgactttagccgtcaattatattagatcctgtgccggttgggccgataagatattgggcaacgttgttgattcaggtaacacccaccttaacctcgtcaagcgtgaacctttaggtgtagttggtcagattatcccctggaacttcccattgctgatgttggcatggaagctgggacctgcccttgctaccggtaatacggttgttttgaaaacagcggaatctactcctttgtctggactttacgtcgctaagttgattaaagaagctggtttccctccaggagtcgtcaatattttgtccggttttggtaacccagcaggagctgccattgccgctcaccccagaatcaaaaaaattgccttcactggaagtacagccaccggtaggaagattatggaggctgcagcaaagtctaatctgaagaaagttactttagagttaggcggaaagtctcctaacattgtttttgaggacgctgacatccaaaaaactattcataatattatattgggtattttcttcaacagcggggaggtttgttgcgccggatccagagtttacatccaagacaccgtgtacgaggaagttttggaggcgtttaagaaggagaccgacaacgtaaaggttggtggtcctttcgaggaaggagtgttccaaggcccacaaacctccgagcttcagctgaatcgtattttgtcttatataaagcatggtaaggacgaaggtgctcgagtcatcacaggtggatccagatatcgcaatagaggttactatattaagccaactatctttgctgacgtcactgaagatatgaagattgtgaaagaagaaatttttggtccagttgttactatcactaaattctcaactgtcgatgaagtcgtcggctacgctaacaacaccaattacggtctggccgctggtattcataccaacaatctaaacaaggctattgatgtagcaagtcgtatcaaggctggtgttgtttggattaatacctacaatgattttcaccatatggtccctttcggtggctatggggagtctggaatcggaagagagctgggtgccgaggctctggacaactatacgcaagctaaagcaattagaatcgcttacactccagaacacaagtaa

SEQ ID NO: 3747 - DNA, 1179 bp, Artificial Sequence
  Optimized genes for Pichia pastoris
atgatctcttttcagccatcatactatgtttcaactccagctctgttgtccccctctagacacgagtacggctaccagtctagtgctgtgacaccatgtttctttgaaaacaatctcgatactgttctttccgcattgcaacgacacaactatacaagtcctccaccaccgaaaattaagcctaccgaagatcaaagatcttactacgtcaagatgtcaaaaaaatccggagatttctccgattacggtgtcaaggtttaccaagaccaaaagtttacccacgtttgggtatattcgacttctgataacgtcaaacgccattttaaatacccaaactctgcagtacaatacgagggtattcgtgccaaggtggctagaaacggtcgttttcttttgatccaaattcctaagatttctagaccagatgttgttcttaatattgttcaaaagaggctacaaagcatcgctaatcaagagagaaaggaaagagaggaattggaaagacgtgagctgcagagaaaggcagctatggaaagaaatcgtagactgagagccttagaagaacagcagttggctgctcaaagagagtacttcgagaagtccttgcagtccgccttctccccattcttcacttatagattagaatcaaaacaaaaggacgagcaagagtctaacgctgaatccgccaccaaccaggtcactgctaagcctaacgtcattcgtattcctgtcaatcatgttgatgagtcaaacgaggttatccccaccaaagccccaaaggcttctaagactgatgtagaggaacaacctaatgttaacgatgtcgagaaggaagctgacatgcaagatgtggaggagaacccaaatactcaagatgctgaatatgagacggagcagtttagcgacttcgaaggtttctcagacgatggagacatcgaggaggccatcgagccaatggacgaggacgaagaagattctgacaactcgcagttcatggaggaaccggaaatattgaagaggagaccttcaccatattctatttcttttcctgccaccttgtccgcagagagctctagtacaaaggcgccaaagattaaaaaacctaataagatccccattgaagaagtggaggacgaagaatttaagagattctcctcgtctagtgacaacgactcttaa

SEQ ID NO: 3748 - DNA, 1230 bp, Artificial Sequence
  Optimized genes for Pichia pastoris
atgtctcaaggtactctatttattacggagcagactagaggcgttgtcccaaaaggattggtccaatactttaaactcgacgtcaagatttctaacaaagaagatgaacaatttaaaaagtatttccccttgaattacattcccgctttcgtaggccctaagggtttgaagttaaccgaggtctctgccgttattgaacacttgcttaacttagccggtgaaaaaaagttgaagggtactaccgagttggaacaggttcaagtcaacaaatggatttcgtttttcaacaccgaagttatttccacatcggccagaatatttctgccactcctaggtaaggcaccttacaacaagaaggatattgacgctgctactgaacgtctggacactattatccaaatcatcgaagcccgtctttcagaattcacctaccttgtaggagagagaattacagtggctgatttatttgctgctaccgtaataggtagatctttggagactatcttcgataaggcttggatctccaaacaccaggacatcttccgttggttctccacagtttcagcacatcctgtgttatcttggagatacgtcgatttcaaaccacgagataagccagttgaatacgtgccacctaagaaggagaagaaggaaaagaaaaaggaggaaaagcctaagcaagaaaaaaaaccggcccctgctgcagcggagcagtccgacgagccacctgttgagaaaaaggccaagcatccacttgaggcactgggaaagccaaagttggccattgacgagtggaagagattttacagtaatgaggaaactagagagagcgctattccttggttttgggagcactttgatgccgacgagtggagtctgtggaaggttacttacaaatataatgacgagcttaccttgacatttatgtccaataatttgatcggtggtttcttcgctagattgaccggttctatcaaatatatgtttgggtgtgctgtcgtttacggagaaaacaacaacaacggtattatcggtggtttcatggttagaggtcaagattacaagcccgctttcgaagtcgctccagattgggaatcttattcttatgaaaagttggacccaaattcagaggaggatagggagttcttcaataacatgctagcatgggataagccaattgttgtgaacggagaagaaaaggagatcgctgacggaaaagttctgaagtaa

SEQ ID NO: 3749 - DNA, 1167 bp, Artificial Sequence
  Optimized genes for Pichia pastoris
atgagccacagaaagtttgaagctccacgtcatggttctttgggtttccttccaaagaagagagcctcttctccaagagcccgttgtaaggctttccctaaggatgacaagtctaagcctgttgctctaactgccttcatgggttacaaagccggtatgagtactattgttagagatttagacagaccgggttccaagatgcataaacgagaggtggttgaagccgtatctatcgtggacaccccacctttagtagtcgtaggtgttgtgggctatgttgaaactacctcaggtttgaagagcctgactaccgtttgggcagagcacttgtccgatgacgttaggcgtagattctacaaaaattggtacaaatcaaaaaaagttgctttttccaagtattcggccaagtacgcaaatgatcctgcttctatcgaaacggagttggctagaattaagaagtacgcttccgtagttagagtcctggttcatactcaaattagaaagactcctctgaaccaaaaaagagcccacctagctgaaatccagatcaacggtggttcgatctcagagaaagtggattgggctcgtgatcacttcgagcaaaccattgcagttgacactgtcttcgagcagaacgagaacattgatgtgattgccgtgactaagggacacggctttgagggtgttacccatcgttggggtaccaagaaacttcctagaaagacacacaggggactgagaaaggttgcttgcatcggagcttggcatcccgctcatgttatgtggactgtcgctagggcaggtcaaaatggatttcaccaccgtacatctattaaccataagatttacagagtcggcaaaggagacgatgagagtaatggttctaccgaatacgatagaactaaaaagactgtcaccccacttggtgggtttgtccgatatggagaaattcgcaacgacttcgttatgataaagggttccatcccaggaccagtcaagcgggtcgtcactttgagaaagtccttgtatactcagacatcaagaaaggccacagaacaggttacgttaaagtggattgacaccgcaagtaagttcgggaaaggtagatttcaaacacccgctgaaaaagcggcttttttgggaaccctcaagaaggacttgcaataa

SEQ ID NO: 3750 - DNA, 1230 bp, Artificial Sequence
  Optimized genes for Pichia pastoris
atgttgaccaaggtcatttctttggctattctgacagcctcagcttttgctgactccggagagttcacattatggaacttgtccccaggtgatccatatgactccacattttggggtgtgtcagaaggtttgattgttccagttgaaccaggtgttaccttcgtcattacagatgacttgcagcttaaaactactgacgatcaatttgttaccgtcggtgaggacagtgcccttggtttgggcgcagaggggtctgttgaattttcaataattaacgaggatggtatcaccagtttatactacaatggagagctcgtcaccgcctacatctgcgagggagccgaacctcaaatctatctgaccggatccgaagaagatccagaatgtgtttcttacaccgtcgctgtgattggcgttgacggtgaggcaccaccaaccttccctgaggaagacgatgaaactactacgactgacgatcctacagacgagcctaccgacgaacccaccgacgaaccaacagacgaacctaccgacgaacctaccgatgagccaaccgatgagcctactgacgaaccaactgatgagccaactgatgaacctactgacgaacctacagatgagcctacagatgaaccaacggatgaaccaactgatgagcctacggacgaaccgactgaggagccaactgaggaaccaactgaagaacctacagatgagccaactccaccacctcctcactggggaaacgagactgtaactgctactaagactgagtatgagaccaccaaggtcactatcacctcgtgcgaagaaactaagtgttacgagacaacttctgacgcctgggtgtctacgtgtacaaccgagattggtggtaaggtaaccaagattgttacttggtgtccgatcccatccaccccaggaccaaagcctccgaaacccaccaagcctaccgagaccaagcctactaccgttccagctcctactacaaaaaaaccagagaccccaactactaaaaagcccgaaactcccgctccagagaagcccgagaagactactacagtcatcccccctccaaccactgaaaaaccatcgaccctaagcacttcttcagtaactggatctgttactatccctactattactgccacgggtggcgcaggttctaacttcaatttgggtggtcttacagtgggtgttgctggaattgcgatggctctgttcgtctaa

SEQ ID NO: 3751 - DNA, 192 bp, Artificial Sequence
  Optimized genes for Pichia pastoris
atgtccagacaaggtggtaaggccaagccactgaaaaagcctaagaagaagactcaggaatttgatgaagaggacttggcattcaaagctaaaatgaaagctgatgccgccgcaaaaaaggctatggctgagaaggcttctaagggcggaccattgattggaggtggtatcaaaaagtctggtaagaagtaa

SEQ ID NO: 3752 - DNA, 354 bp, Artificial Sequence
  Optimized genes for Pichia pastoris
atggcttctgccggactcaatgacgtcgtcaccagagaatacacaatcaacttgcacaagcgattgtttggcgttcaattcaagaaaagagctcccaaggcagtcaaagaaattaagaaattcgccaaactgcatatgggtactgaagatgtaagactagatcctaaattgaacatggctgtgtggaagcgtggaatcaagggtgtgccatttagaatgaggttgagaatttctagaaagcgtaacgaagacgaggacgctaagtataagcttttctcctacgtcgaaccagttaatgttcctaccgttaagggtttagagactgttgttattgaggaggatgatgaggagtaa

SEQ ID NO: 3753 - DNA, 1089 bp, Artificial Sequence
  Optimized genes for Pichia pastoris
atggccaagtcatcaaaagtttcaagtaagtccgcagccaaagcatccaagggagagaagaagtcgaagaagcaagagtctagttcctctgagtcatcatccggatcatcatccgagtcctcaggatctgagtctgaatctgaagaggagtccgttaaagagagtaaaaaagaggcaaatagttctgagtccgagtccgagtccgaaagtgagtcggaagctgagtcagataagaaagaagaagccgctgaatctggtagcgaatctgagtcggagtctgagagtgaatctgaaaaggaagacgaaaaaagcgctaagagatctgccgaggagtcagaggaggaacccgccaagaaggctaagactgaggaaattaccactttgttcgtagggcgattgtcttggtctattgacgacgagtggctaaagaaggagttcgaacacattggaggtgtcgtgggtgcaagagtcatgatggaaagagctacaggtcgttctagaggatacggttatgttgatttcgacaacaaagcttctgccgaaaaagcgttagaagaaatgcagggtaaggaaatcgatggtcgtcctataaacgttgacatgtccaactccaagccagccgctcctgctgctagaaacaacgatagagcttcacaatatggtgataaaagatccccaccttctgataccctgttcttgggaaatttgtcgtttcaagctgaccgtgatactttgtttgaactttttagcaagcatggtaacgttacatctgttcgcattccaacccaccctgagaccgaacagccaaagggctttggctacgtccaattttctagcgttgacgaagctactggtgctcttgaagccctgaacggtgagtacgtcgataatagacctatccgtttagactactctacgccgagggatccatctgcttccggaggtagaggaggacgtggtggaagggggggtagaggaggtttcagaggtggcagaggcggtttctccggtgacagaagttttggttctggtgccaactcggctccagtgaattctggtttccagggtcaaaagaagactttcaattaa

SEQ ID NO: 3754 - DNA, 915 bp, Artificial Sequence
  Optimized genes for Pichia pastoris
atggccgataacaacaagtccaatttcttcgttgattttatgatgggtggagtttcagctgctgtgtcaaagacagccgccgcccctattgagagagttaagcttctcattcaaaaccaggatgaaatgttaaagcagggtcgattggcaaagaaatacgatggaattgcggagtgttttaaaagaactgccgcagacgagggaattgcatctttttggagaggtaataccgctaacgtcatcagatacttcccaacccaagccctcaacttcgcctttaaggataaatttaaggctatgttcggttttaaaaaggatgaaggatggtggaagtggttggcaggtaatcttgcttcgggtggactggccggtgctaccagtctgttcttcgtctactccttagactacgctagaacaagacttgctaatgacgctaaggcttctaagggttctggagaaagacaatttaacgggctgatagatgtttacaagaagactttggccactgacggaatcgcaggtttatatagaggtttcttaccatccgttgttggcattgtggtctaccgcggtctgtatttcgggttgtatgactccttgaagcctatcgtcttggtaggtccattggagggctcttttctggcttctttcctactaggatggactgtcactaccggtgcttcaaccgcttcttaccccttggatacggttcgtagaaggatgatgatgactagcggtcaagccgttaagtacaacggagctttcgacgcttttcgtaagattgtcgctgccgaaggaatcaaaagtttgttcaaaggttgcggtgctaacatcttgcgtggtgtggctggtgcaggcgtaatttctatgtatgaccaacttcagatgatcatgttcggtaaaaaatttaagtaa

SEQ ID NO: 3755 - DNA, 849 bp, Artificial Sequence
  Optimized genes for Pichia pastoris
atggctagaggacctaagaagcatttgaagaggttggcagccccatctcactggatgttggacaagttgtccggcacgtacgctccaagaccttctcccggtcctcacaagttaagagaaagtttaccattgattgtattccttagaaacagattgaaatacgctcttaatggtcgtgaggttaaagctattttgatgcaacgtcatgtccaagtcgatggtaaggttcgcacagatgctacctttccagccggtttcatggatgtgatcacactggaggctactaacgaaaattttcgtctcgtctatgatgtcaaaggtagattcgccgtgcatagaatcactgacgaagaggccacctacaaactgggcaaggtaaagaaggttcagcttggtaagaagggtatcccttatttggtgactcacgacggtagaaccattagatacccagacccggatatcaaagttaacgacagcattaagattgatttggctactggaaagattctagacttcgttaagttcgatgttggtaaattagttatggttactggaggtaggaacctcggtagagtcggagtcattacccacagagagaagcatgaaggtggatttgacttggttcacatcaaggacgcacttgaaaaccaatttgtaactcgtctgtcaaatgtttttattatcggggaggccaacgctccaattatttctttgcctaaaggaaaaggaataaagctatcgatcgcggaagagcgtgaccaacgaagacagcaacagggtctggatgtcgaagcagaagaagaggttgaggaggaagctgatgtggattccgaggtcgacttcgagtaa

SEQ ID NO: 3756 - DNA, 1218 bp, Artificial Sequence
  Optimized genes for Pichia pastoris
atgcaaacattcgttaaaagatccattagaaacattcctaaaatggcaacaagcgcacatcaaaattttgcaaagtacctggctaccgaccacatggcttctgatttagttcctctggacgcttccaaacttcaagttacaagaaccacccaaccaaagtctaaactgccaaaggaaaagttggttttcggacaatcatttaccgaccatatgctgactgtcgagttcgaccaggcctcaggatggggtacaccagaaattaagccatacggacctttgtcactcgacccatcggcatgtgtcttccattacgcttttgagttattcgaaggtatgaaagcctacaaggattctcaaggtaaaattagactattccgtccagacatgaatatggctcgttttaacaaatccgctgctcgtatctgtttgccaacggtcgatggtgaagaactaatcaagcttatttcggaactgttgaagttggaccaatccttcgtccctgaaggtgagggttactcactatatattcgacccaccctgatcggaactagttctggtcttggtgttggtgcgcctgacaaggccctcctttatgtcatttgtagccctgtaggtccgtattacccaaccggatacaaggctatttctttggaagccaccgattacgccactagagcttggcctgggggtgtcggtgacaagaagttgggcgccaactacgccccatgcattaagccacagttatctgcagctaaaaacggtcaccaacagaacttgtggctttttggggaggagaagttcattaccgaagttggaactatgaacgttttcttcgtttttaaaaacgctgatactggtaagaaggagttggtgacggcccctcttgatggtactatattggagggtgtaactagagactccatcttgaagttggctagagataggttggatcccaacgagtgggaagtcaatgaaagatactatactgcacacgaagtggctgaaaaggctgagaacggtttgttagtggaggcttttggcagtggaactgctgctgttgttgcccccatcaagaacatcgcctttaatggaaaagattatgatgtgccattagtcccaggcgagcagtatggtgagatggctaagactgttgctgattggatagccgacatccagtacggagtagttgattccgagtggtctagagttatcaattaa

SEQ ID NO: 3757 - DNA, 345 bp, Artificial Sequence
  Optimized genes for Pichia pastoris
atgggtttgggtaatttctggttggagagaaacattacaaacaagcatctggtcagatcttccaatttcgccgaagatcgtactcagagattaaaagaagctaagctggacgcagccaaagatattaaggagtacaaacaaaagaaggagaaagaactaaaagagcacgaagctcagttttcaggatctaacgatgacttggaaaaggcagctgaatctgaggttcaaaccgagttggttgagatcgacaagagtgctgaagctaagaaggaggacgtagtgaagcttttacttgatgccatcactcatcctaagccagaattgcacgtcaacgccagagcttaa

SEQ ID NO: 3758 - DNA, 309 bp, Artificial Sequence
  Optimized genes for Pichia pastoris
atggttcaagagatcaactccgctgaggaattcgacaaggctattgcctctggagtcgtcttagtcgattttttcgctacatggtgtggtccatgcaaaatgattgccccagttctggataagttctctaaggaatatgagcaagttaccttttacaaggttgacgttgataaactttcagaagtggccgctagatttgagatttctgctatgcctacttttttgttcttccagaatggtgaagtggtcagtaaggtaactggtgccaacgcagctgcaataaagcagactattaccaaattgatctaa

SEQ ID NO: 3759 - DNA, 1779 bp, Artificial Sequence
  Optimized genes for Pichia pastoris
atgaaaaacttctttaattcttccgattcagagaagcatgaagagaaagtcaacgatgaaaaagtgcaatccatctcctactctcaatcaattttatcgttgcctgacttggaccccactttgtcaagacatgcttctgagtacgaagcagatttgagtaagattcagcccggggttgctggagaaaaaggccaccaattgaagagagatctgaaagctagacatatttctatgattgcccttggaggttctttgggtactggtttgttaatcggtactgctaactctcttgccacagcgggaccaggtagcgttttcatcacatacagtttcgtcggtcttatggtcttctttgtaatgtcagctttgggagaaatggctacgtatatcccgctcgctggaggtttcaccggttattccgatagatatgctcatccagctctaggctttgctgtaggttattcctatctcgctaaataccttattgttacacctaatcaactagttgctggatcattggtcatgcaatactgggtctcccctgaaaaggtaaacccaggcgtttggattaccatctttctcgtttcggtcgtcctgattaacttgttcggggtgaagttcttcggcgagttggagttttggctatcctctttgaaagtcatcaccgttttaggtttgattatcatgttgttcgtattcatgttgggaggtggaccagatcacgaaagacttggtttcaggtattggacgaacccaggtgcttttgcaccatggaagggtatcgcctcaatcccaaaggccaagtttatagctttcgtgagttcttttgtttacgctgtttttgcttacagtggtactgagctggtgggagtcgttgtcgcagaggcttctagaccacgccgtaacgtgccaagagcaatcaagttaactttttataggatctgtgtgttttacattctctcggttctgttgttaggttgttgcgttgcatacaatgacgccgaactggtcgctgcccgtgcaaagtctacctctagctctgcttccccattcgttgttgcaattaacgcccaaggtattagcggtctacctcacttaatgaatgcttgtattttaatctttgttttctcggcctgcaattctgacctgtacatagccactagaactctgtacggactttccgttcagagaaaggctcctaaaattttgtccagaaccaacaagactggcgttccttacctttctttggctgttgccttctgcttctcctgtctagcctacatggcttgttcttcaggttctgcgtccatctttggttatttcgttaacgtagtctctattatgggtctgttgacttggatctctctgttgattacccatatttgtttcatgaatgccatgaaagcacagggaatacctagaaaatctttaccatatcgtgccccttttcagccatacgccagttggattactctgttcttctgtattcttgtcgctttgattaagaatttcacagtgtttttgaacggtttcaactacaaggactttattaccggatatatcggtatcccctactactttatctgtttctttggttacaagttcattaccggagctaagagacacaagtcagccgaggttgatttgttgactcacaaggacgtcatcgacgcagaagaggaggagtacgcttttgccgaggctgaacttaaggctgaacgaggtaacaagaaggacgcccaatggctttatgatcgtattttcggttggattttttaa

SEQ ID NO: 3760 - DNA, 408 bp, Artificial Sequence
  Optimized genes for Pichia pastoris
atgtctgacgctgttactataagaacacgtaaggtgattaagaacccacttttggcccgtattcaattcgttattgatgttcaccacccaggtaaggccaatgtctcgaaagatgagttgagagagagactagctgagatctacaaggctgataaggacgctgtatccgtctttggtttccgaactcattttggcggaggtaaatctagcggttttggattggtctatcagagtgtttcagatgctaagagattcgaacctacctacagattaatcagatacggactggctcagaaggtggaaaagccatccagacaacaaaggaagcaaaagaagaaccgtgacaaaaagattttcggtacccaggaaaaatttgcaaaaaaggctgccaaaagagccgcagagtaa

SEQ ID NO: 3761 - DNA, 1329 bp, Artificial Sequence
  Optimized genes for Pichia pastoris
atgccttcacactttgacaccttgcaactgcacgctggacaaactgctgaggctcctcataatgcgagagctgttcccatctacgctacttcctcttacgtctttagagactctgagcatggtgcaaaactgttcggtctggaagagcctggttatatatacagcagacttatgaatcctactcagaatgtttttgaagaaagaattgcagctcttgaaggtggcgccgctgccttagcagtgggttccggacaagccgcacaatttctcgctatcgcaggtttggcccatacaggagataacgtgattagtacctctttcttgtatggaggaacttacaaccaattcaaggtagctttcaagagattgggtattgagtctcgttttgttcatggtgacgatccagccgaattcgagagattgatcgacgacaaaacaaaggccatttacgtcgagtccattggaaacccaaagtataacatccctgacttcgaggccctcgctgagctcgctcacaagcatgggattcctttggttgttgacaacacctttggtgctggcggatattatgtccgtccaatcgaattaggtgctgacatcgttacccacagcacgaccaaatggatcaacggacacggtaatactataggtggtgtagtcgtagacagtggtaaattcccatggaaagattacccggagaagtaccctcagttctcaaagccatctgagggttaccacggtttgattttaaacgacgctttcggtcccgccgctttcattggccaccttagaactgaactactgagggatctgggaccagcatcttcaccatttggtaactttctaaacatcattggtcttgaaaccttgtctttacgtgctgaaagacacgctgagaatgccttgaagttggccaagtaccttgagacttcaccatatgtctcttgggtttcatatccaggcctggaatcccacgattaccatgaagctgctaagaaatacttaaagaatggatttggtgctgttttgagttttggagttaaggatcacggtaagcccgcccttactcctttcgaggaggccggtccaaaagtggtcgattcgttgaaggttttctcgaacttggcaaatgttggagattccaagtctttgattattgctccatattacactacacatcaacagttgtctcatgaagaaaagcttgcctccggggtcacaaaagattccatccgagtttctgtgggtactgaattcattgatgatttgatcgccgacttggagcaggcatttgcgctggtctacgaggaagctaacaccaagctataa

SEQ ID NO: 3762 - DNA, 3051 bp, Artificial Sequence
  Optimized genes for Pichia pastoris
atgctcaaccgtgttctcttagttgctctgagttgtgtggtcttttttcatctcgtgactacttttcctgtcggtacttcttctgacagcttgcagattagaaatttgctttctcacaacttcaccagagctaacatttccgaaggtctatcatctggtgccacgtacttcgtcgatgaagatactgaaacctactacgataaggaattgaaggtcctaaggaccacgagattcccacgttacaacaactaccagttgcaaccatatgttgccaatggttacattggttccagaatccctagggttggttctggatttacttacgacacttctgataataagacttcagagaacttgaagaacggctggccacttttcaacaagcgctactcaggtgcattcatagctggtttttttaatagtcagcctaccgttcctgagaccaacttcgaggagcttgagaaagacggttacgagtctatcattgcttcaattcctcagtggacatctctggagcttaccgtaaacgtcaacggaacaaatcaaactttgaaggccgatgacgtggatattacccacatttccgactactctcagcaactcagcttgcttgacggaattgtaacgactaactacacctggctgggtttggttaacgtctccatatctgtcctggcccacagagatattgtttcgctgggtttcgttagcttagaactaagttcacaaaaaaatataactgtttccgttacggatatcctggatttcgctaccagtactaggtgctcctatttggattctggtgttaatgagcaaagtattttcatgaaagtccagccttccaacgttccaactaacgctactatttattcttcattgatgtcctccaactctacttcatccttgttgaaacaaaatcagacagtttcacaaaccttacgtgtgaatttgtcgaaaaaccaagctgcttcctttcagaaatacgtgggtgtagtgagcgacgactacttggattcaattgaaacaaatttaacttcataccagtttgcccgagagaccgcaaagttcgctgaaattaagggtcgttcttggatcctaaagtctcacaaagaggcttggaatgaacttttgaacggaaagagcattgtctttcatgacaacgatttcttaacacttgcctccgattcgtctatttaccatttgatggctaacaccagatctgaggcaaatggaggtacctctgctcttggagtctcggggttgtcttccgactcgtacggaggtatggttttctgggacacagacttctggatgttgccttccgttcaagcattctccccacgtcacgctgtttctttaagtaagttccgagaccatacccacgaccaagccaagaagaatgcgcaaactagagatatgaacggtgcagtctacccttggacctctggaagatttggaaactgcacatccaccggaccatgttacgattatgagtaccatatcaacattgacattgctttcatgttctggaagttgtaccttggaggcgctatcgatgatgactatatgaaagaatttggttacccgattattgaagacgttgcgtcattctttgttgattacgtggactataacagtacattggataagtatactactagaaacctgactgatccagacgagtacgctgaattcaagaacaacgccgctttcactaacgttggtatcagtcagctgatgaaatgggcattgattttgggcaaacacctcaaggtcgggaacgaacggtcttacgataagtgggaagacatcatgacaaaaatgtacttacccgtaaaccacgctggagacgtaacactagagtataccggtatgaataattctattgaggtcaaacaagccgatgtcgtgctgatttcttatcctctggacgatgaggacggcgccttgcaagagtattttgactatgacgaggatcgtgcaatcagcgacgttagatactattccgacaagcaaacagacgaaggtcctgccatgacattctcagtttattccgctgtcaatgcaaagtttaataaggaaggatgttcctctcaaacctatcttcttaagtcagtcgagccctactttagatttccatttggacagatgtctgagcaatctactgaccaatatgatacaaacggtggtacccatcctgcattcccatttctaactggtcatggtgcttttcttcagtcgtctatctacggcttgactggtttaagattctcttacatctataacgataccgataagtcaattaaaagaagattagcctttgatccactgcagctaccatgtttgcccggtggtttctccattaacggattcgtttacatgaaccaaaccttagacattactgttaacgacacttatgctaccattgcccacagaggtaatgctactactatcaacgtctacgttgattcacgtaatgaaatgggtggaaaggagcacaagatccaaccaggtaaatccttgtccattcctttgtaccaaactgaacaaaatatcccgggttcatttatcgaatgtactgtgaagaatgtaactgctttacagccaggcgttgtgggagatccaattcaagccgttgctgacggtgataactctactatctggaagatagagtctagagaagaaccaacccaccttatctttgatttgggtgacgagttggacatcgaagggggtttggttgtttggggcacttaccccgctgaatcgttctctgtttctgtcttgagagatttcaacagtaccaactatagagttatcaacaatgtcgaaaactacgacctgatctatgaaagcggaaacgtaacagcttcctcccctttcgatgagtctcatatcaagaaggtccagattctgccacataattgtactaatttcacgtttagtgagttgaccgcttctagatacgtgttgttcgaatttactgacgtcctgggttatccacaagattactcttatggtgcccaagttgccgaggttgtattgtactaa

SEQ ID NO: 3763 - DNA, 438 bp, Artificial Sequence
  Optimized genes for Pichia pastoris
atgggcaagggaaaacccagaggtctcaacgctgccagaaagttgcgtgtgcacagaaggaataatagatgggctgatctacaatacaagtcaaaattattgggtactgcattcaagtcctcgcctttcggaggttctagtcatgccaagggtatcgtcttagagaagatcgggattgcttccaagcaaccaaattccgccattagaaaatgtgtgcgtgtccagttgattaaaaacggtaagaaagtcaccgctttcgttccaaacgacggttgcctgaactttgttgatgagaacgacgaagttctgcttgctggatttggaaaaagaggaaaggcaaagggtgatattcctggtgttagatttaaggtagttaaggtttctggtgtctcattgcttagcttgtggaaggagaagcgagaaaaaccacgttcttaa

SEQ ID NO: 3764 - DNA, 1035 bp, Artificial Sequence
  Optimized genes for Pichia pastoris
atggacattgaagcagagccatctcttagatctatcgtcaaccacgagtcattgaagtggatctttgtaggtggcaagggtggtgtcggcaagactactacctcttcctcaatttctatccaacttgctctacataatccgaataaaaagtacttgttgatttctactgacccagctcataatttgagtgatgcctttaaccaaaagttcggtaaggatgcaagacaggttgagggtttgccaaacttgagttgtatggagattgatcctgattccaccttggaaaacctacagaagaataacgaatcgaccttcggttctgccggaggaaacgatccactgaagtctatgatgggagacatcaccggttccattccaggtatcgacgaggctttctcgttcatggaagtacttaaacacattggtgagactaaagagaaccagatcaaatatgatacagtgattttcgacaccgctcctacaggacacactttgagatttttgcaactgccttccactttagaaaagttactgggaaaagtcaacgaattgagtgggagattcggacccatgttaaataaccttctgggttcacaaggtggtcaatctattgactttgctagcaagatcaaggaaatacaagttcaggtgactgaggttaacaagcaatttcaagacccagagcttaccacgttcgtctgtgtttgtatttccgaattcttatcactttacgaaacagaacgattgattcaggaattgatgtcttataacatggacgttaattcaattgttataaaccaactgttgttttctgatgattccgagtgcagaaggtgtaatgccagatggcgtatgcaaaagaagtacctcgaccagatggatgagctatacgaagattaccatctggttaaaatgcctttattggctatggaggtccgtggtctggaaaatttgaagaagttcagcaaatacctcatcgagccttataactccgagactgatggacacgttgtgtttgacttggaagagcaataa

SEQ ID NO: 3765 - DNA, 321 bp, Artificial Sequence
  Optimized genes for Pichia pastoris
atggccactgaaaccgctttgtcctacgctgcgcttattttggctgattctgaaattgagatttcttctgacaacttgctagcattgactacaaaggccgatgttaaagtcgacaaaatctatgcagatttattctcgaaagctctggacggaaagaatcttaaggatctcttttttaacatctcatctgccccagcttccggtgctgcagccggaggtgctgccgcttcaagcgctgacgcagaagaggccgccgaagaaaaggaggaggaggctaaggaagagagtgatgacgatatgggcttcggtctgttcgactaa

SEQ ID NO: 3766 - DNA, 444 bp, Artificial Sequence
  Optimized genes for Pichia pastoris
atgtctcaggaggccaagtcggttcaatcagttcaaactttcggtaaaaagaagtccgctactgcagttgctcacgtgaagcaaggttccggtttgattaaggtcaacggatctcctattacacttgtccaaccagaaatcctgcgacataaggtgtacgaaccattgcttttggtcggtttggacaagtttgcaaatattgatatcagaatcaaagtaaccggaggcggtcacgtctctcaggtttatgctattagacaagccctcgccaaaggactaatcgcttacactcaaaagttcgttgatgagagcaccaaaaacgaattaaaaaaaatatttcagtcttatgacagaactttattgattgccgattccagaagaaaggagccaaagaagtttgggggtcgtggtgctagggctcgtttccagaagagttacagataa

SEQ ID NO: 3767 - DNA, 5937 bp, Artificial Sequence
  Optimized genes for Pichia pastoris
atgtctttcaagcagtcattgctttcccaaacaccatcctccattactccatcccaattcttggctgatctgatctcacagcactctaatgagcaaaagaacgtcctggccttgttatttgctgaaatcttagtgccaggttcacagcatataagttcttccacctcgaccaagactaccgctctcaccccttccactcttcctgaagctactgctagagggagccaatttagatcattgttgaaaggtttgaatatcgagcagtctacctgggaccaaattatcgaactcatcttcgaaaccgacgattacttttccgacgcaacctccatttctcaagttaccgttgcttctatttctcagttcttggcttcattagaacctgaaaacattgataagtttctcagatatgttgctcaccacaagttaaaggatcaccctttcttattccagaagaatttgctggtcagtctgtatagccttaaccctcagcatggtgctattgacttgctgagttgtcctctacagcctgttcttgctaacgaacctaactctagacgcactattatttggttcaaatatattgccgagctagaagtctccttgcttgttgaattaaagtcacgtccagccaccgctgacgaaaatcaaatcaatgagattatcgaagatagctacaaaaccgctcctgaataccttggacttgccgccctgcacttgtggaaagagaataaagataacaacgctgacccaggaacaactctggcatacttgaacttgtgccatcatttcattgttcaactgttggacattaatagcccatacttgatcattttgttaactgaattcaaagagatctcagaggacgagttgtcttccctgttggctaactatgtgtccttgcgtccaaacggggctattacggtggccacctacgcgcttagagatggggttctgtcctccgtcctaaacaagcttagtaagtttaacgattgtttgtctgttgctattgaggcctcgaacttaggatggaacggtctggaaaaattcgtgcaaaaccttttgtctaataatccaaagcaggttcagtcacaacttgtcgatttcttggaagaacaatcttcttttgagtaccagtcttcaaacaatgagtcaaacgctcaaatcaagtctcatagatccttgtctattccagtcgtttatacgctgttgaaagctattgagggccagaagttatctggtgatttagtagacaagtttaagaacgttcaagtcagtgttatccaggcctacccccgtttgattaacttcggacgaggccatgacgaggcaatcttggcaaatggtaattcccactccttccctccaagtgttgaacaagagatgaaatcttactaccagaagatgtacctcaagcaactggagattaaatctgtcattaactcgctaaaggcttttaaggattcagataacccacacgagcaggacatcttcgcctgtatgattcattctctacttgatgaataccgattttttcctgaataccctattgatgctcttgctactacatccgttttgttcggatctaccatttactttcaactgatcgaaggtacaacccttaccatcgctttgagatacatcttagagtcatgtagacaaccaccagaagataacatgtttaagtttgccgttcaagctttatacacttttcgggaaaaacttggcgattataaaagctactgcgccctactctccgaggttccatcactgaagcaacaacctcaaatctacgaaattctccaacaagttatgaacggtactttcagagcgccacctagtatcccttcccagggaattggttcaggtgaacgtcaaccatcccaaggaaaacagccatctaatgacagccttgtggtctcaaagttcaaatctcttaacttggccgttgagttgcagagaagggaccaagagactcccgatgaaaacgtcagtgaccatgtgcttttcctagtaaataacatcaccgaggagaatttgtctgcgaaagtggaggaaatgaacaaagtcttggaaccacaatactttgaatggttttcaaactacttggtcactcaaagagttaagactgagccaaactatcattctctatactgtagcttgatttccagactcgacaatttactcttggatgcctatatcttgaatctaacgttcaaagaaattattcttattttgaacaaatgttacgacgtaaacgatgagattagcggtcccgagagaacccacttaaagaacctgggtagctggcttggattaattacattgactcgtaataggccactgaagcaccgtaatttggctttaaaaatgcttgtactagaggcctacgacaagaacaagttggaagtcgttttgcctctggtatgtaagattttagaccaagctaagaattctaaagtctttttgcctccaaatccctggacagttggaaacttaaagttactgaaggaactgtatgatgttggaaacttgccattgaagttgaagttcgagattgaagtgctttacaattctttaaacactaagctaggtgacatcgaggccgctaacatcattagaactcatcagcccgctgatatcgaccagtttgctgtggcaacgaacatgatgaaggaattaactctatccaacgttaaccaaatgaaacagcaacaacaacaacaacagcaacagcaacagcaacaacagcatcaacagcagcaacaacaacagcaacaacaacaacaacaatttttcttgcagcagcaggctgcattgcaagcacaacaggtccaacaaccccagattcctttcgatccacaggccaatcctggcgtttcaacagctactcctgctgatgagtcgaaccaactcaaggttttctcaaacttgctgggtacaacttcctttgtgacaattcctacactgaagtacttgttccaggctgctctggcacgtgccgtcaaggagattttgccattagttgtcgaccgaactaacttgatcgccctggttaccaccaaagctttggtcagtaaggatttcgctcttgaatccgatgaggctaagttccgtaccgcttatattaatcaagtttcatacttgacggagtctctttctttggcatcgtgtcgtgacccactcagggaatctattcaaatgaacgccctgcaaatagctaacacaatgcccaatatcgattccaccctctttgaagaactgccccaggctattactgacaacatagatttagctagcacaattatccaaaaggctgctgttgagagagcaatccaagacatcgacgagttaatggctcctcagttggcaatcagacgtcagcacagagagcttaagccaaatcaacaatttattgatcccactatgcgttctagataccctatgttgctaccagtcccattgggactgaaaagtgatggtgtcatcccgaaacaatttatgatatatgagaacttcggtaaaaatcgtatcgttagtccgatgcaacaaccagaacatcttcagaatattaactcacaattgaatccgtccttgaggcaaggtgcacaacagcccttggttccgccaggtgtcgccgagcagatgaagcaacaaatgcctccagccttgcctggtcaaggtggcgcagtttccctggaacaaaccttcatgtttctgcagcagctcgttgatagtgtaattaacctcactagagatgctccagagaaacttatctcagaggttaatactgacagcgttgtcgttaccgtattaggtgagatccttcaaacctgcattggtgctactgttactgactcactgatattaaagatctcacagtatgtgatgaatatgctttttgtaagaaccaactcttccttgacccaaaacaccttggtgttcttacttgacaagttgtgcgagttgtctccttttactgccaaggacatctcgtggtggttggtgcacgcagaggacgagagaaagtataacaagaatgtcatgcgcgacttgatcttactaggattggttccacttgctgagctggacagatccctggctatccagatcgaaaaaaagaacgtcaaggcagtcctgttcactatttacttgattcacgatagtattttatctgaagacccaatagcactaagggctgacttgatcaacagtatcgaggctcttcaagttctggcccatgagccatccgaaattggtagaaaggcttacatgtccatcagtaggttgaaggccattgttaaatctaactcgattcaaatcttcaagatgtttggtacttctactatttccaagaagcaatatatgtcctacgtttttgctgagtgggttaagttggtccaatactctagagtcaatagagttcttgaagactttatatggcagttggtcgatgatggtattgtgaataatagcgaaaatctttcgttactgattacaactgctactgagatgtctgttgctgccttttctaaagaagccgacccttctaaaaaacttcacattgaaacttatgctccagctgacgcattggccttgctcttggttaagttgttgcttatgcaggaggattccacaggtgttgaaagaaagaccttcttcaactcgatgttggctgtcattgtcctggcttttgcctctgaccataacaacaactctacttccttcaatgagagaccatatttccgtatcttttcttctctattttcctactggctatccgccagacacgaattcgaagatggtgatgacgagtctcttaagaccttcaattcggaactttatttgattctagcccaaaatttgatggtaatgcagccatcttctttccctggttttacttttgcttggatttctcttatttcccatagaatgttcatgcctatgattctagaggtgccagaaaacaagggttggggtcgtttcgtgaacttgcttcaatgtttgttgtctttccaactgcactacgtcgattccgagaagataagtgacgtggttaacgttgtttacaaaggaactctgagaatcatcgctctgttatcgcacgactttcctgatttgttggtgcagtatcattatcaattgatttcctccacccccgagtcttatgtgcaactgaagaatattatatcttcagcctacccaaagggtattaccgttccaaacccattccagcagggactgaaggtagacagattggaggaaatcaagcaggagccaccaattggttaccatcctgaatctgacttaactgcaaagggcttgaagaagccagttgaatcttatttgagaatcccgtcacagtctttgttgaagactatctccacgggattgtcggttgcggagccaagaaacggaaagtctaaatacgatgccggtcttgtcaacgccgtagtattctttgtcggaatagccgccgtcgaggagcagaaatcttttcgtgacggatcttcgttcgattctactagtaaccacgtaatgttgttgtcttcactgattaaggatggcgatgtcgaattacaaaacctaattttgacagccatcgcaaaccaattaagatacccaaacagtcacactcactggttctcctgtattctgttgcacttcgtcggttcagccactttgtggggtgatcaaagagaggcaatcaaattcaatatttcttgtgtcctgacaaaaagagctatgtcatataacccgataccatggggtatcttggttacattcttggaactcgtttcaaactctgagtacgaaatcttctcctctccttttattaagggagacgctaccttggagagactcttcggtactcttcaacaccacgttagaaaccaaaagcctatcgatgaacaaccagaacctttgaagctataa

SEQ ID NO: 3768 - DNA, 900 bp, Artificial Sequence
  Optimized genes for Pichia pastoris
atggctttggctatcccgcagattggttttggtactgggaccacttggtataagtacggaagagaaagtgagattgatcaaacactagttgacgcccttgtctctgcactgcaagtcggtatcacacatttggacggtgccgagtgttacggtactgctcttgagactagagacgccattaaaaaggctaacattcctagggaaaagttatggatcaccgaaaagtattacgccggagatagctctcataagtccaagtcaaaggccgccaacccactagctgcactgaaggaaattttgagattggaggagttggagtacgtagacttgtacttgttgcactcgccatatatcactaaggaaacacacggcttcaccctggaggaggcttggggttacttggaagaggcccagtctctaggtcttgctaagaatattggcgtttccaacttcaccgttgcagatttagaaaaaatactcaaagttgcaaaagttaagccacaagtgaatcaaatcgaatataatgcttttttacaagaccaaaccccaggtgtcgtcgaattctcacaaaaaaacggaatcctgatcgaagcgtactctccattggctcctctctacaaaggtgacaagtctataaaggaagtgaaagaattcttggattacgtttacgagcttggtaagaagtatggtaagagtgatactcaggtgctgcttaagtgggttttacaaaagggaatcattcctattaccacttcaactaaaaccgagagagttaaggagtttctgaagattgatgatttccagttggagccctccgaggtcgaaaaaattacgactttgggagctaaagctcctgtcgtacgtcagtactgggttccagaatattccaagtttgactaa

SEQ ID NO: 3769 - DNA, 456 bp, Artificial Sequence
  Optimized genes for Pichia pastoris
atgggcagaatgcactcctcaggtaaaggtatttctgcatctgccctaccatacagtagaaacccaccttcgtggttcaaattgaccccggatgacgtagttcagcaagtcatcaagtacgctagaaagggactgaccccatctcagattggtgtgcttctgagagacgctcacggtgtggctcaaactcgtttcattactggtaacaaaattttgagaatcctgaagtcaaatggacttgctccagctatccccgaagatttatattatttgattaagaaggctgtcagcgttcgaaagcatcttgagcgtaacaggaaagacaaggattctaagtttagattgattttgatagagtctagaatccatcgtttagccagatactatagaactgtttccgtcttgcctcctaactggaagtacgaatccgcaacagcctctactctcgttaattaa

SEQ ID NO: 3770 - DNA, 855 bp, Artificial Sequence
  Optimized genes for Pichia pastoris
atgagaaacgataagatttctttgtactcgcccgactactacctggcttgtacagtaggaggtgcacttgcctgcgctcctacccatggtggtatcaccccattagacttggtcaaatgtagaaggcaagttaactcctccctgtatagcagtaactggaagggaattacctcaataatcaaaaatgagggtttccctgctttatataccggagtcttgccaacctttattgggtacggactgcaaggtgctgccaaatatggtggttacgagtacttcaagaaacaatacactgacttgaacggcggtaaggccaatactttcactttcttggctgcctctgctactgctgaattcatagcagacatctttctgtgtccattagaggcaatgaaagtcaaaattcagactacacttcctcctgataagcccaatttgagagaactctctctgtacaaaggccttgttccattatggtgtagacagatcccttatactatggttaagttcacgtcatttgagaagatcgttgatttgatctattccaaggcgattaagaagccgaaggaccagttgtcaaacttgcaacaaactgctgtctcttttacaggtggttacatcgctggaattttctgcgctgctgtgtcccacccagccgatgtaatggttagtctaatgaacaacaataaggaaggactatctgtggcccagctttaccaaaagatcggattctccggtttgtggaacggtctcggtattcgtattgttatgattggcactttgactggttttcaatggttgatttacgattcttttaaggtttattctggtcttccaaccaccggtggacactaa

SEQ ID NO: 3771 - DNA, 1089 bp, Artificial Sequence
  Optimized genes for Pichia pastoris
atgttgtttccaagagaaaccacctgctccactgagtccgacttcaatggagaacacatgggtgctcgtatatctagtgttttcgtcattctggtcacctcgatgtttggagctttcttcccaatcctgtcttctagatattcattcatcaggttgcctgattggtgtttttttattgctaagttttttggttctggtgtcatcattgctacggccttcattcacctattgcagcccgccaacgaggctttgtctgacgagtgtctaggtgaaggattcgaagattacccttatgcctttgctattgctttggtgtctattttcgtgatgtgtttcggtgagttgatgactttcagattcatggaccacaagcttgaagtcgctgaggagaaacaaattaatgctgacaaaatctccaagctcgagaacgaagaagatgacgaggttggtactggtctagacttgaacacccaaccagcacctgaaccccagcagatgaatccggagaacacattagagaatcattttgctcaccaaaacgaacatcaagatattgaaaacgttggaaccctggtggataataaccttgagtcgtacaagagtcaattcataagcgtattagttttggaatttggtattatctttcactccgtttttgtcggtttaacacttgctacttcaggtgatgagtttacaaccctctacccagttatcgttttccatcagatgttcgagggtttgggattggggacgcgaatcgctgccacaccttggcctcataacagaagattgactccatggttcttcgctttggcctacggcctgactaccccaattgccattgctatcggccttggagtaagacactcttacgccgctggatcctcaactgcgttgattactaacggatgcttcgatgctgtttcagcaggtattcttatttatactggtttggtcgaacttatggcccatgaatttatcttttctacccaattcaacggcaagggtggtttgaagcgtctgttatgggcctacgcaatcatgtgtctgggtactgggttgatggcattactgggtaaatgggcataa

SEQ ID NO: 3772 - DNA, 771 bp, Artificial Sequence
  Optimized genes for Pichia pastoris
atggctgttggtaagaataaacgtttgtctaagggaaagaagggtcttaagaagaaggttgtggacccatttcaaagaaaagagtggtacgacatcaaggccccaacgacttttgagaacagaaatgtgggcaagaccttaattaacaagtcaaccggtttgaagaacgctgtcgacgggcttaagggtagagttgtggaagtttcattggctgacctacaaggctccgaggaccacagctttaagaaaatcaaacttagagttgatgaggtccaaggtaagaacctgctgaccaacttccatggtttcgatttcacttctgataaagtcaggtctttggtccgtaaatggcagtcgctggttgaagccaacgttaccgtaaagactgctgatgattatgttttaagaattttctgtattgcttttactcgaagacaccagaatcaaataaaaaagactacatacgcacagagttcccagctatctgctatcagaaagaaaatggttgaaatcatgcaaagagaggtatccaacgttactttggctcagcttacctctaagctcattcctgaggtaattggtagagagattgaaaaagccgctgaaggtatctacccattgcaaaacgtccacattcgtaaggtcaaggtcttgaagcaagccaagttcgatctcggagcattgttagccctgcatggagaaagtgttacagaggaaaatggaaaaaaagtgggatccgaattccaagacgttgtcttggagacagtttaa

SEQ ID NO: 3773 - DNA, 987 bp, Artificial Sequence
  Optimized genes for Pichia pastoris
atggtcgttgccatcgagggtggaacgggtcttggtctgatgaatttaacctggaaacctactccaactccaattgatgacgctatcgagactataaggtatgcagtcgaagaggctggagttagatacttgaacggtggtgagttctataacttccccctggactctaatctgaatttgcagtacatccaggagtttgccaagagataccctgagttatacaaaaaggtctctttgtcggtaaagggtgctgtttcattagtcgacgtttctccagatagctccccagaaaacctggagaagagtatttctaatattactaaacatttaccaaacaacttcttgcctatttttgagcctgctcgcattgataagaggtattccattgaagagaccattaagaacttgtctaagtttgtggaagacggtagaatcggagggatttctttgtctgaagtcggtgccgacacaatcagacgtgctgcaaaagttgccccaattgcatgtgttgaagtcgaattctcccttctcactagagatatcctacacaatggtgtgctggctgcctgtgaggaccttaatattccaatcattgcttacagtcctctaggacgtggttttcttactggcacaatcaacagtaaagctgacattcccgaaggcgatattagactatccttggagcgattcaacgatgacgaggttatcgaacacaacttgaagttagttcatggattgaaaaagatcgcagataagaagggtgtgacattggcccaattgtccttggcctggctgcgtaaattcggagataagcacgtgaaggttcttccaattccaagctgctcatcaccgagacgtgtagcggaaaataccaaggagatctctctcaccgattccgaattccaagagattaccgactttgctgaatctgtccctataaagggtggtagatacaacaaggcttcagaagctgttttgaacggataa

SEQ ID NO: 3774 - DNA, 1938 bp, Artificial Sequence
  Optimized genes for Pichia pastoris
atgccagcagttggtatcgacctcggtactacctactcttgtgtcgctcacttcgctaatgacagagtcgaaataattgctaatgaccaaggaaacaggactaccccatcttttgttgcgttcacagatactgagagactcatcggagacgctgctaagaaccaggcagctatgaacccagccaacactgtgttcgacgctaagcgtttgattggtagaaaattttcagatgctgagacccaggcagatatcaagcatttcccattcaaggtggtagataaaggtggaaaaccaaatatccaagttgaattcaagggagaaactaaagtttttactcctgaggagattagctcgatggtcctgactaagatgaaggacaccgccgaacaatttttaggggacaaggttaacgatgctgttgttactgtcccagcatatttcaacgattctcagcgtcaagctaccaaggacgctggactaattgctggactaaatgttatgcgtattattaacgaacccacagccgcagctatagcttatgggcttgataagaaggctgagggtgagaagaacgtattgattttcgacctggggggtggtacttttgatgtgtcattgttgtctattgaggatggtatcttcgaggtaaaggctaccgcaggtgacactcatcttggaggtgaagactttgacaacagacttgttaaccactttattgccgagtttaaaagaaagaacaaaaaggacttgagttctaaccaaagagctcttaggagactgagaaccgcctgtgagagagccaagagaactctgagctcatctgctcaaacatccatcgaaatagattccctttttgaaggagtcgatttctatacctccttgactagggcaagatttgaggaactgtgcggtgatctatttagatccacaatcgagcctgtggagaaggttttgaaggatgcaaagcttgacaaatcccaggtcaacgagatcgttttagttggtggttctaccagaattcctaaagtccaaaaattggtctctgacttcttcaatggtaaggagccaaaccgatccattaatccggacgaagccgttgcctacggtgcagccgtgcaagcggcaattttgtcgggagacacctcttccaagacgcaagatcttttattactcgacgttgcccccctgagtttgggcattgaaaccgctggcggtatcatgacgaagttgattccacgtaattcaaccatcccaactaagaagtccgagaccttctcgacttacgccgataaccaacctggagttctgatccaagtatacgaaggtgaaagagctaaaactgctgataataacttgttgggtaaattcgaattgtcaggtattcctccagctccacgtggtgtccctcaaattgaagtcacttttgatatggacgctaatggcattttgaacgttagtgccgttgagaaaggaactggtaaggctcaacagatcactattaccaacgataagggacgcctatctaaggaggacattgaggctatgatttctgaggctgagaagtacaaagacgaggacgagaaggaagccgctagaatccaggctcgtaacgccttggaatcctactctttttctttgaaaaacactttgaatgagaaggaagtcggcgagaagttagatgcagctgataaggagagtttaactaaggctatcgatgaaacaacatcatggatcgacgaaaaccagacggccactacagaagagttcgaggccaaacaaaaggaactggaaggtgttgcaaatcctattatgaccaaattctatcaggctaatggtggtgctccaggaggagccgctcctggtggtttccctggagctgccggtgccggtgccgaagctcccggcgccgatggtccaacagtggaagaagtcgattaa

SEQ ID NO: 3775 - DNA, 906 bp, Artificial Sequence
  Optimized genes for Pichia pastoris
atgggtggattatctttcgagcgtcagtctacttctattctgaagaacttagacaatccaatcgagcaagaagagattagaacccctgagccagaaatggaggttaaggagactgttgaaggagttccaatggccttgtctggttcaacctcatccaccaaatcgaaccccgacataaataacaccgtcgttaatcctgaatccctcgtccctcctcccccaccagttgattccgttccatttaaattgaacaaacagtcagtgctctccgatttccttaagcaaaacagattggcaaccgagagaatcaatgaatattctccggctatcatcgagagcaacggtactggtcaacaaccacacactctgtggattggttgttccgactctagaatctctgaagcttgtttgggtgtaatgcctggcgaagttttcacacatagaaacatttgcaacattgtcaacagtaatgacttctccgtgactggtgctatccaatttgcagtggatgtcataaaggttaagaagatcattgtgtgtggtcacacggactgcggaggagtctgggctgctttgagctcgaagcgaattggtggtgttttggatctgtggttgaatccagttagacatgttagagcccaaaaccgtaaagagcttagtttgattaaggaccctaaagagaagtgtgctacattggcccgtctaaacctaattaattctgtacagcaacttaagaggcacccaagttgtcttgctgctttgaagaaccaggatgtcgagatttacggtttgatgtacgatgttggaacagggctgttatctgaagtagaaatcccttgtgatgatgaatttgatgatgtctttcatgtcggtgaccatgacgacactgaagccggaggccactaa

SEQ ID NO: 3776 - DNA, 1440 bp, Artificial Sequence
  Optimized genes for Pichia pastoris
atgtcattacaggaagcggtgaaggagatccaatcttccttcgatgtgtcccaagaagtcctccaaagatctgtagacaagttcatcgagctagctaagaaaggtcttgctagtaacgaggacaaattgggtatgcccatgctgccagcctacgtcacccaagttccaagtggtaaagagaagggcacctacttagctgctgatctaggtggaaccaactttagagtctgctctgtgcatttgaagggagataacactttcaaccttgttcagcaaaaaagccctatccctgccgacatgatggttggtacaggtgatcagctcttcgcctacctggcctccaagattcgtaagttcttggaagaacaccacggcgacgctttagaagcagctcacgaaactaattcgcgtgctaactatttaaagttgggttttactttctcctttcctaccgcccagcattcgttggattctggttcattggttagatggacgaagggtttcaacataccagacgtcgttgatcaggacgtcgttcaacttttgcaaaaacatctggatgccggaaagattcccgtccacgtcgctgctttggctaatgacactgtcggaaccttgctttcccgagcctattcagctaacgcaatcgccggaggtaagcaaggtgagacaattatcggtgcaatttttggtactgggacgaatggggcttatttggagaagttggacaacatcaagaaattgcctgaagctgttgtcaaggatttgaaggcaaagggtgttacacatatggtaattaacaccgaatggggatcctttgataatcgtcttgaggtgttgcctactactaagtatgacagagatgttgatgctctgacagcaaatccaggtattcacttgttcgagaaaagagtttccggtatgtttatgggagaaattttgcgcaatatcttagtcgatttccattcaagaggcctggtttttacccaatacccaaacttcgaatctctgccacacaggttaagaaccccgtgggatcttgactctgaaaacctttctttgtttgaggttgacgacagtaaggacatgaaaccaacagaggtcactttgttgcaggccctgagactcccaaccactctagaggaaaggcaagccattcaagcactgactagagcaattagccgtagatctgcttacatttctgctgttccaattgctgctatcatcatgcttactggtgccttggagggtcaccatattgaggttgacatcggtgttgacggatcagtggttgaattctaccctggctacagaactatgctgagagatgctctagctttgactcagattggtactaaaggagagagacgtacccacatcaatattgccaaggatggatctggtgtaggagctgctttatgtgcctccgtatctatataa

SEQ ID NO: 3777 - DNA, 354 bp, Artificial Sequence
  Optimized genes for Pichia pastoris
atgtctgatcaaggaagaaaggactttaccgataaggttagtgagggactgaagcctgattcccaaaagacatatttggaacagactaaggagacgttgactgatgctggtgacaaggctgccaataagcttaccccagaggaacagaaagggttcggtcaaagagtcggagacgccgttaagaacggtaaggacgaagccgataaagaaactcaaccaactttggtggagcaggtacaaaataccgctggcgatgccctagaggcaggtaaggaagcattagctaacacttctgagtacatttccggtgctttctcgggtgctaaaaacggtgctgactcaacaaaaaaataa

SEQ ID NO: 3778 - DNA, 648 bp, Artificial Sequence
  Optimized genes for Pichia pastoris
atgtccgaagattacagattggttgtcgtcggacccccaagtgtgggaaaatctgctctaaccattcagctgatcaggggagaattccttactgaatatgatcctaccatcgaggatagctacaagcatccgtgtgaaattgatggagctcctgttatgcttgacattttagacactgccggtcaagaagactactcttctatgaaggaattatatatgaagacgggtgagggttttttgctggtctttgccattaacaagagatctagcttggaggaactcaagcctttctatgaccagatcgtaagagtcaaggaagggatgcaaagtgtgccaatggtcttggtaggtaacaaatccgatgttgaggactctaaacgagaggtctccagagatgagggtgaagccttggccagacagttcggctgccaatacattgagacctctgctaagactaatacaaacgttaaggaggcattttacaacgttgttcgtgctactaagtctataaaagataccaaccaaactggtatcgatacctcagttgaccgttcgaaaaatcacgagaagccaactgtgagaggtaatgctacagctccagcatcctcctctgactcctcatcatcaggttgttgtattgttatgtaa

SEQ ID NO: 3779 - DNA, 981 bp, Artificial Sequence
  Optimized genes for Pichia pastoris
atgaagacccaaatcgactacaagttttatccaactaaggaggtcactatcatttctgcccctttctcagctgggcagggaaaggggggagtcgagaaaggcccgggacttcttcttaagcacggtctcagagaagacctggaggcattgggttggagtgtttctattaaggaacccttgaagggaaccggtctagatgtcccaccttctgagttagaggaggaattcgatagatcccacggtatcgctaagcgtccaaccgtagttgctcaagctacagaaagagtttacagagccgtgaaggaggtatcgcaccaaaagagattgccacttactattggaggcgaccactccattggtgttagcactttggccggttttttagatgctaatccagacgcttgcgtcctgtggatcgatgctcatgcagatattaataccccagaaacttccccatctggtaatatccatggattcccagttgcattggcaatgggtttgagtagagaggtgtggcctaaacagttctcttggttggatgaagccaaaaacaaacttgctgctgaccgaattgcctacatcggtctgagagatttggatccttgtgaaaagaagcgtgtcagagagttaggaatcgccgcttactcaatgtatcacgtcgataagtatggtatagctaaggttgtggaaatggccctagccagaattaaccctactggcaaatctcccgttcatatttcctacgatgttgacgctttggatcctttgtttactcctgccacaggaactccagttcgtggtggtctgaccttcagggaaggaatgtacattgtagaagctgtcgctgaaaccggtaacttaggtgccctggacattgttgagtgtaacccagacttggcgtcaaccgacgtgcatgagatagacactatcacggctggttgtgctattgcaaaatctgcttttggtgagacactcgtttaa

SEQ ID NO: 3780 - DNA, 969 bp, Artificial Sequence
  Optimized genes for Pichia pastoris
atgactgacgccgctgctccaaaaaagccacaaaagaacaccgcagttgatcttttggccggcggtactgctggattattcgaggctctgtgttgtcatcccctagacaccatcaaggtcagaatgcaattgtatagacgtacttccgcaaatgccggtgttaaaccaccgggttttattaagaccggtctaggaatagctgctaaggagactcctatggctctctacaagggtttgggtgccgtggtcattggaatcgtccctaagatgggaattcgtttttcttcatacgaattctataagagacaattggcagacaaggagggtaaaaactcaacccttacaacattcatctccggtgttggcgctggtgtcactgaagcatgcttggtcgtaaatcctatggaagtcgtgaaaatcagattgcaggctcagcaccattctatgtctgatccactggatattcctaaataccgcaatgccctgcacgctggatacttgatcgtaagggaggaaggttttaagactctgtatagaggcgtgaccttaactgctgcgagacaagccacaaaccaaggagtgaactttacggtttactctaagatcaaggaacgtttgcaagaatatcagcagttggaggttttgccaagttggcaaaccagccttgttggtctcctttcgggagccctgggtccattaagtaatgctcctttagatactattaaaacccgtatgcaaagagagacaggagtcacgaacgagtctggtgttgcaagaattttaagaatctccaagagattgattcaggaagaggggatgcgagctctttacaagggtattactcctagaattatgagggttgccccaggtcaagctgttactttcaccgtttacgagctgatgaaagacgtactagttaagttgccaattataggtaacgaagattcccaggagttggttatcgaataa

SEQ ID NO: 3781 - DNA, 456 bp, Artificial Sequence
  Optimized genes for Pichia pastoris
atgagcgaagattgggattctgtcactgttattggaagaaaggctagagtcggaggttcgggtccacgtgaaaatatcgctagaactaagggtgccataaatgaggcaagaagaactggtagtgttatcgctgtagaaaagaaatacggttccggaaactccaaatcagaccccgagggccaaaagctaactaagattgacagggagacagatgtggtcccaccaaagaaaatcgatgccaacgttgggaaggctatttctaaggcaagattggataagaagttgacccagaaggaactggccaccaagattaacgaaaaacctaacgtcgttaacgactatgaggctggtagagccgttcctaaccagcaattactcgctaaaatggagcgtgtgcttggtgttaaattgcgaggaaagaatattggtgacccattgttccctaaaaagaattaa

SEQ ID NO: 3782 - DNA, 1914 bp, Artificial Sequence
  Optimized genes for Pichia pastoris
atgctaagcgtcagaagacaattaatgtctggtagatcttggttcagtacaacttcagtggctaggaaggtctactctgctcaacaggatgtcaaaggaactaatgcttcaatcgccatggcaaaggactaccatattatcgaccacgaatatgactgtgttgttgtcggagctggtggagcaggtcttagagctgcatttggtctggctaaagagggttttaaaactgcctgtatctccaagttattccctactagatcccacacagttgctgcccagggtggtatcaacgctgccctcggtaacatgcataaggacgattggcactggcacatgtacgacactgtcaagggctctgactggcttggtgatcaagacgctattcattacatgaccagggaagctccagactccattatcgagttggagcactacggtgttcctttttcaagaaccgaagaaggacggatctaccaaagagccttcggtggtcagtctaaggaatacggtaagggaggacaggcttaccgtacctgcgctgtggctgacagaactggtcacgctctcttgcacaccttgtatggccagtcgctgcgtcataatactcactttttcatagagttctttgccatggacttgctaatgcacgacggtaaatgtgtaggatgcattgcctacaaccaagaggatggtacaattcatagatttaaagctcataaaaccattatcgcaactggtggttacggtagagcttatttttcatgtacgtctgcacatacctgcacaggtgacgggttcggtatggtttccagagccggtttgccacttgaagatttggaatttatccagttccatccatctggtatttatggttccggatgtttaattacggagggagccagaggggaggggggattcttagtgaactctgaaggtgagcgattcatggaaaggtatgctccaacagctaaggatttggcttgtagggatgtggtttctagagccatcactatggagattaacgaaggtcgtggagtcggacctcttaaggatcatatgtatttgcaattgagtcatctgcctgcttctgttctgcacgagagactaccaggcatttcggaaacagctcacatttttgccggagtcgatgtcactaaggagccaattcccatccttcctaccgtgcactataatatgggaggcgtaccaactaagtggtccggtgaagcattgactctcgatgaagatggtaatgataaggtcgttgagggtctactggcttgcggtgaagctggatgtgcttcagttcatggagctaaccgtttgggagctaatagcctgctggatcttgttgtcttcggccgcgcagtggcgcacaccattcgtgattgtttgactcctaacactcctcataaggaacttccagcagatatcggcttcgagtctatcgctaaccttgaccgtgttagaactgctgacggtgatatatccacagcggacctgcgtttggagatgcaaagaactatgcaaaaacacattagtgttttcagaacccaagatattatggatgaaggtgttaaacaaatcaacgagattgataagaaatttgccaacatcaagactacggacagatccatgatttggaattccgacttggttgagaccttggagttgcaaaacttattgacttgtgctacccaaacagccaagtccgcctctgtaagaaaggagtcaagaggtgcccatgcccgagacgacttcccggaaagagatgatgagaattggatgaagcactcgttaagctggcagcacaagagtggttctccagttgaattgaactaccgtaacgttataaccgaaaccttggacgaggcagagtgtaagccagtacccccaactgtcagagcctactaa

SEQ ID NO: 3783 - DNA, 933 bp, Artificial Sequence
  Optimized genes for Pichia pastoris
atgcagattttcgttaagactttgactggaaagaccattacccttgaagtggaatcctcagataccattgacaacgtcaagtctaagatccaagataaagaaggtattcctccagaccagcaacgcctgatctttgccggtaagcaactggaagatgggcgtacactatcagattacaacattcagaaagagagtactctacacttagttctcaggctccgtggtggaatgcaaatttttgtaaaaactctgaccggtaaaacaataactcttgaagtagagtcttcagacaccattgacaatgtgaagtcgaagatccaagacaaggagggtatcccacccgaccaacaaagattgatttttgcaggaaagcagttggaggacggcagaacattgtcggattacaacatccaaaaggaatctactttgcacttggtgctgaggctaagaggaggtatgcaaatcttcgttaaaactttaaccggtaaaaccatcactctggaagtcgagagctccgacactattgataatgttaagtctaagattcaagataaggagggtattccaccagaccaacaaagattaatcttcgctggtaaacagttggaagacggtagaactttgtccgattataacattcagaaggagtctaccttgcatttggttttaagattgagaggcggaatgcaaatctttgtcaagactcttactggtaagacgatcacattggaggttgaatcctccgacacaatcgataatgtcaagagtaagatccaggataaagagggtattcctcctgatcagcaaagattaattttcgctggtaagcaacttgaggacggacgaaccttgtctgattacaacatacagaaagagtctacgcttcatttggtcctgagacttcgtggtggagaattgtgttctattgtttaa

SEQ ID NO: 3784 - DNA, 1866 bp, Artificial Sequence
  Optimized genes for Pichia pastoris
atgggaaaggactacacccctttggtcgctacaatcgacatcggaactacttctacccgtgctattctctttgactaccacggtcaagaagtagccaagcatcagatcgaatatagcacttcagctcaggatgacattaagagaaaaagatcccaaattatatcctccgagggcatttctcttaccgtttcggacgatttggaagtagagtccgtggataataaggctggtcctaccctccaatttccacagcccggttgggttgagtgcagaccatctcatatactagccaacgcagtccaatgcttagctgcttgtctagtcactatggagaacaagaacttggacagggacgaaaagaacaaatataagctcatcagtatcggagtggccaatatgcgtgagacaaccgttgtttggtcgaaaaagactggaaagcctctgtataacggaattgtttggaacgatactcgtaacaatgatatcgttgatgaatacacagcaaagtattctgagaaggagagggaagagatgcgcaccctttgcggttgtccaatttcaacttacttctctgcaaccaagttcagatggctgttgaagcacgtgcctgaagttaagcaagcctacgataacgcagatggtgatttaatgttcggtactatcgattcatggttaatctaccacttaactaacgagaagtcccatgtgacggatgttacaaacgcttctcgtactaattttatgaatattgagaccaacaagtacgatgacagactgttgaaattctgggacgttgacacctcaaaggtcatcttgcctgagattagatcttcagctgaagtatatggacatttcaaagtcccacacttggaatctatcggttatgttgagagttaccttacggatgacgctttggcccttttagaaactattgaaggtgctccattggctggctgtctgggtgaccagtccgcttcgttggtcggtcaattggctgtcagaaaaggcgatgcaaagtgtacttacggtaccggagcctttctgctgtataatactggcgaccaaacattaatttctgagcatggtgcattgacaactgttggttactggttccctggacttgacgagagtgaagatggaaagcactctagtaaaccacagtacgctttggaaggatccattgccgtcgctggttccgttgtgcaatggttgcgagacaacttgagacttatatccaaagcacaagatgttggtccattggcttcccaagttgataactcgggtggagtcgtttttgtaccagctttcagtggtttattcgccccatattgggactcaaactcaagaggtacaatcttcggtctaacccagtacacctctgcttctcacattgctcgtgctgctctagaaggtgtgtgttttcagacaagagctattttgaaggccatgatctctgacgccggtgcatccgcggattttttggaagagtcatctaaagccactgggcacaacccgctttccgtcttggctgtcgatggtggtatgtctaagtctgacgagatgatgcaaattcaagctgacattttgggaccatgtgttaccgttagaagatctatcaatcccgagtgtacggctttgggtgcggctattgccgctggattcggtgtccctaaagaggacagaatttggggtagcctgaaggaatgtactgaggccattcttgagggaaataagatgtacctggctgctgggaacactagcttggactttaaggccactctttctgatgaagttagacgtaaagaatggagactgtgggaaaatgccatcgccaaagccaagggctggttgaaggatactgcataa

SEQ ID NO: 3785 - DNA, 1116 bp, Artificial Sequence
  Optimized genes for Pichia pastoris
atgtcttcttctgagataattgagaacactgccttgctgcaaaagtaccaatcgctggaccagagaggtaagattattgctgaatacatctggattgacgctagcggaggaatccgctctaaaggtagaacgctatccaagaagccatcctccatcgatgacctccctgaatggaactttgacggaagttccactggtcaggctccgggacacgattcagatgtttacctaaggccagtatcctattacgctgacccttttcgtagaggagacaacatagtcgttttggctgaatgttggaataacgatggcaccccaaacaaattcaaccatagacatgagtgtgccaagttgatgaaggcccataaagatcaagaagtttggtttggattagagcaggaatatactcttttggacaagtatgataatgtctatgcttggcctaagggtggtttcccagctcctcaaggtccttactactgtggcgtcggtacaggtaaggtgtacgcccgtgacatgattgaggcacattatagagcttgcatccacgcaggcatcaatatttctgggatcaatgctgaagttatgccatcccaatgggagttccaggtcgggccctgtaatggaatcgatatgggtgatcaactttgggtcgcccgttacttgttgcagcgagtggcagaagaatttggtatcaaaatttcattccacccaaagcctttaaagggtgattggaacggtgctggttgtcacacaaacgtgagtacctctgctatgagggttccaggtggcatgaaatatatcgaagctgccgtcgagaaattggccaagcgtcatcttgaacacattgccttgtacggttccgataacgagcaaagactgactggaagacacgagactgcttctatgacctcattcagtagcggtgttgctaatagaggtgcttcgattagaattccaagatcagttgcgaaagagggatacggttacttcgaagaccgtagaccagcatctaacattgatccctatttagtaaccggaattatggttgagactatttgcggtgcaatccctgacgccgatatgaccaaggagtacaagagagaatctgactaa

SEQ ID NO: 3786 - DNA, 465 bp, Artificial Sequence
  Optimized genes for Pichia pastoris
atggtcaaggctgttgctgtgctgagaggtgactcaactgttggaggtacagtcgttttcgaacagagctctgagtcctcccctacaactatcacgtacgacattaaaggtaactctccaaatgccgaaagaggttttcatattcatcaatttggagacaacactaacgggtgcacttctgcaggaccccacttcaacccattcggtaagacccatggtgctccaactgatgaggcaagacacgttggagatttgggcaacgtgaagaccgatgctgaaggtgtcgctaagggagttattaccgataatcaagttaaattaataggtgagacctcgatccttggtagaacagttgtcattcacgatggtaccgacgacctaggtaaaggaggacacgctgatagtttgaagactggcaatgccggtggccgtcctgcctgtggtgtaatcggtttggccgcttaa

SEQ ID NO: 3787 - DNA, 1029 bp, Artificial Sequence
  Optimized genes for Pichia pastoris
atggttaaggttactgtctgcggtgctgccggtggaattggtcaaccgctgtctttgatgtttaaattgaacccatacgtcactaccttggcactctatgatgtcgttaatgttcccggagtaggcaaggacctttctcacatcgatacggataccaaattggaatcttacctaccagaaaacgacggactggagaaggctttaactggttcagatcttgtcatcattcctgctggagtcccaaggaaaccaggaatgactagagacgatttgttcgctattaatgccggtatcattagagaccttgccaacggtatcgcccaattcgctccttccgccttcgtgttggttatttctaatccagtgaactctaccgtccccattgtggccgagattttgaagaaaaacaacgtcttcaatcctcagaagctcttcggtgtaaccacattggattgtgttagagctaacacatttgttgcagaattgagcaaggacaaggaggctagtgcatttgacactagagttttaggaggccatagcggtgagactattgttcctgtgttctcgcagagtgctccagaagtttataaagagttgtctgacgaacagaaggctgctttggttcaccgtgttcaatttgggggtgacgaggtagtcaaggcaaagaacggtgcaggttccgctacactgtcaatggcgtatgccggctacaagcttggtcatgctctgctggccgccattaacgataccccaaacattatagagtcaaccttcgtttacctaaaagactccaagatcaagggagctgctgaggccttcaagtacatcaatgagaagcttaaagactccgattcatctgatgtcgacttttttgctctacctgtcgtgttatcgtccaatggaattgaagagatcaagtgggatatcttggaaaaggttgatgctaaagaaactgaattgttaaaaatcgccactggtcaactgtccaagaacattgctaagggtactgcttttatagcaggtaattaa

SEQ ID NO: 3788 - DNA, 1878 bp, Artificial Sequence
  Optimized genes for Pichia pastoris
atgtcaaacactaaggagactggcttgtttgagactggttccacttcctccgaaaacgaaaagcaaagcatatctgacaacgagattgccgagtctttggaccaacagaatatcctgacacaatactctgaggaagacgttatgtcaatgggtagaaattatgctatcaagcatggactggatcctgacttgttcgctaaaggtgctgcaattgcaagaaatccaattggttataaccgtatggagtttttgtcacaggaagaaaaggaaatcttgtatcaagaggagcaccagaagtggaaattacctaagaagctgtactaccttatcattatggctagtatgggagcctgtgtacaaggtatggacgagtcagtgataaatggtgcgaatctgacctaccccgcaggtctaggaatcggtagtgactctgaaagggactcttggcttcagggattggtcaattctgctccctacatttgctgtggtttgattagctgttggatgaccgatgcctggaatgctagactgggtagaaaatggactatcttttggacctgctttatttcggccatcacttgtttttggcaaggcttctgcaacacctggtatcacctctttatcgctagatttatgcttggttttggaatcggaccaaaatccgccacgattcctgtctacgccgctgaatgtgtcccacataaaataagaggggccttggttatgatgtggcagatgtggaccgccttcggcattatgttgggttacgttttctccttggctttccacaaggtgccggatcacggtattggtggaggtggtctggcatggcgtttaatgttgggatctgcaatgctcccagctattgttgtgtgtctacaagtttggtcctgcccagaatctccaagatggttgatgggtaaagaaagacacgccgaagcttacgaatcgctaaaggttttgagaaatcatccagttcaagctgcaagggatactttctaccagaatgttcttttgatggaagagaactcttacacttccatgggtttcttcggtaagttgaaggagatggtggtagttagacgtaacagaaacggagctatgggtgctggtattgttatgtttatgcaacagttttgtggtatcaacgtgattgcatattactcttcctctatctttgtggaaagcggattcacagaaacctcggctctgcttgcttcttggggattcggtatgatcaactggctcttcgccctgcccgccgtcttcacgattgatctggctggtcgaagaactttgcttttgattacctttccactaatgagtatgatgttgttgttagccggattctctttttggattccagaggagaacgagaaggcgagagttggggttgtcagtttgggtatttacttatttgcagctatctactcctccggtgagggacctgttccttttacttactcagctgaatgtgctccactatacatccgtgatgtagtcatgtcattcgctacagctacttgttggtttttcaactctgtcttagctttaacttggccttcattgaagaatgcttttaaggttcaaggcgccttcggattctatgccgcttggaacattgttggtttcttcttggtccttatgttcctgcctgaaaccaagggcctcacattagaggagcttgacgatgtcttcgatgttcctacatggcaacacgcttcttatcaattgaaaaagatgtggattaacatccaacgcaacatcattcgtaaagatgttgaaccaatgccacctctttataagcaccatagaatggcattaaccaacgcccagtgggaggagaagcatgaggtcgaattggtagagaacgtctaa

SEQ ID NO: 3789 - DNA, 4512 bp, Artificial Sequence
  Optimized genes for Pichia pastoris
atgtccagcacttcaagcagcatcaacgacaaagataaggagtcatctaacattgactctcctaaggacactgttccctatgagccaaccagattcgtcggggacctggagaatcaaaacgaggatgatatctactcagaacagttgagtagaatcttgacacaatcagaagcagtacagaagatccaatccttggcccgtacgatgtctcgtatgaccaagaaggagctagctgcatttgaggtgaaccaggatgactttgatttaaaaattttgctgcactacctgagagctaagtccgaggaacaaggtattgagagttgttctgccggagttgcctttaaaaatctaaccgctacgggtattgacgtctctgctgcctacggtccaacagttgatgaaatgttgcgcaatttcttcatgtggcccattagattcgccaaaagagaacatgtcaaaaccagacaaattattaggaattttacaggatcaatcgaggctggtgagctgtgtttagtcctgggtagacctggcgctggttgttctacccttttgaaatgttgcacaggaaacacttcggagttgttgtccgttgaaggtgagttctcttacgacggactcgatcaagcagaaatgatgaaggattacaagggatatgtcatctacaatccagaactggatactcactttcctcacatcaccgttaagcaaacaatagacttcgctttgaagatgaagactcccgctaagcgcgttgatggcattcctcgtaaaaagtacattgacaccatgagagacttgtggtgtactgtgttcggactgagacatacttatggaaccaaggtaggtaacgacttcatcagaggtgtctctggtggagagagaaagcgagtttctattgtcgaagctttggccacaggagccagcgtctatgcctgggacaatgccaccagaggtctggacgcgtccaccgctctcgaattcactcaagctatcagaacctcaactaacttgctaaacgcatccggtatggttgccatctaccaagccggtgagaatatttatgagcttttcgacaaggtttgcgttctttacaacggtaagcaagtttactttggtccagccgaaaaagcaagaaagtatttcgaagatatgggttggtataagccacctaggatgaccaccccagaattcttaactgccgtcaccgatccttccggtcgttttattagagaggggttcaagaacaaggtaccggaaaattcagaggacttcgaacaatactggttgaactctccagaatatcaagagtgtttgagaagccacgaccagtacattcaggaccacaatcctgaggagactagacagagactcgccaccgctaagtctcagactcgtcagaaggcagtgcgatccaagagtagattcgttgcttcatatcctaatcaaatagcttactgcgtaacaagaggtttccaaagaactaagggcgaaattgcgtacactcttgtgtatctgtcgtcctttctgacaaaaggtttcattgtaggttcaatgtactggaatatcccgaaagatacctccggactttttagtcgttctggaatccttttctactgcttattattctgtgcagtcacatccttgagtgaaatttcccacacttacactaacagacctatcatcttgaaacaaaaatcttactcattgtatcatcaatcggccgagtccctgcaggagatcatcactgaattgcctactaaactagtggccgtgattattttggctttgactacatacttcatgcctggcttgagattgtccgatggtggatctgctttctggatgtacttgctattcttacttctcattcaacaatgtatgtcttttatgtttaagttaatcgccactttgacccgtgacgctggtaccgctcacgcttgtggtggtctgcttgctttaatgatgtgcgtttacactggtttcatcatacccctgccatatatgcatcattggatcaagtggtttaattggatcaacccaatgcgttactgttacgaatctctccttgctaccgagttgcactcgagagaaatgaagtgttccgaatacattcctaatggtccagattatgaaggtatctcaatggaaaattccgcatgcactaccactgcctacaaccataccactggtttggtttccggtaacgctttcttgaccgcaacttacaactatcgttactcacatgtctggcgtaactttggtattaacattgcttggactgctggatttattatcattaacactattttgtctgagttcgtcaagaatgtggaaggaggaggtgatatgttgttgtataagagaggtcacatgccaaaggaaggtattgaagcagttgacggaaaggtcgcttccaaacaggagatgatggaggctttgaacggtccagacgtggacttaaagaaggtcattgccgagagagacgtatttacgtggcaacaccttgattacgttatcccatacggaggtgcaaccagacagttattaaacgacgttcaagggtacgtaaaacccggcaccatgactgccctgatgggtgagtctggtgctggaaagaccactcttttgaataccctctcccaaagaattaacttcggtactattaccggtgatatttttgttaatggacgtcctttggattcgtcctttaagagacgtacaggcttcgtccaacagagtgatttacatcttgccgagtattctgttagagagtccctgaggtttgctgtaaaccttagacaaagtgagaaggtccctcaagccgaaaagtacgagtacgtcgagaaaattatcaaccttttaggtatgcagaactatgccgaagctattatcggcaagattgggcgtggtttaaacgtcgaacaaaggaagaaacttagtattgcagttgagttggtcgcaaaaccatctcttcttttgttccttgatgaacctacatcaggtctggattctcaaagcgcttggtcaattattcagtttttgagagccttgtccgattcgggtcaagctattctttgtactattcatcaaccatccgctactttgttcgaggtttttgatagactgttgttactgaagaagggcggtaggactgtgtattttggtgatattggaccaaactcttctacaatgttgtcttatttcgagagggaatctggaattaagtgtggtgtctccgaaaacccagctgaatacattttgaactgtattggtgcaggtgctactgctcacgcatctgctgactggggtgacttgtgggtgtcgtcgcctgaacacgctgctgtgactgaagaaatctcaagactcaacactgaactacaaaagagaccacttccagagaacatcgaagacttacagtccaaatttgctacatcttacccacaccagatcaagattctgttccttcgtactatggtccagttttggagatctcccgtctacattcgggctaagttcttggaggccgttgtttgtgcgatctttgttggtttttcctttgtcaaggttggacatggcttgcaagaggcccaattcggactaactagtatctttatgatgttgataatcagtctagctatgattaatcagatgcacgttttcgcattcgatagtagagagttgttcgaagctagagaatctgcctctaacacatttcactggtctactttgctactcgctcagacctggtgggagacgatatggtgtatggcttgtcagtttctatgctttgtttgttattattttccagccggttttagcgggaccgctcatcacgccggttacttctttttacagtttgttataatcttcccaatctactattgttcctacggattgtgggtattgtatttctctccagacgttccatcagctggtatgatcaattcaaacttcttcgccgctatgctgctgttttgcggagtcctgcagccaccacaattcatgcctggtttttggactttcatgtacaaattgtctccttacacatatttcgttcagtctttcgttgcccctttggttcataatcgtaaactagtgtgccgaacaaacgaatacaccttgatcacgccacccgagggacaaacctgttctgaattcttggacccgtttatagagtctgatggaggatatctgggtaacccagacgctactgagtcttgtgagtactgtccatatacctaccaatctcaagttatggagcaattcaatatcaagtggagttacagatggcgaaactttggcttctttttcgcctacataattttcaattatgttgctttgttatcttgttactacctcatgcgtgttaaagtgtggaacatgaagtcaattttgaacttcaaaaagtggtttaacggtcctaggaaggaaagacatgatccagagacgaatattttcgctgctcaacctgctgatgctaagttggcagttcttaaaaaaaaggaataa

SEQ ID NO: 3790 - DNA, 396 bp, Artificial Sequence
  Optimized genes for Pichia pastoris
atgatgacgttgttacaacttttggtgctcgtctacattatctataaggtcttcccaattctaagacgtttcttcagcacaggtaccatggtttctgagcaggttttgtcaaagactaaagctcttattaaagatcataaagtttttgttgcttctaagtcctactgtccatactgctcccagactaagaagcttttggagagtttaaacgcaaatgcctttgttgtcgagttggataccgaacctgacggttcagatatccaagccgctttgttagaattgactggtcaaagaaccgtaccaaacgtctttattaatggagaacacgtgggcggaaactcggacctgcaagctctgaactctgagggtaaattgaagactctgctaaagaattaa

SEQ ID NO: 3791 - DNA, 963 bp, Artificial Sequence
  Optimized genes for Pichia pastoris
atgcccgccattgttgacccatcttttcaaaccaatcacgtctgtctacacgtcagcgatatacagaaatccatcaaattctacacagaatactttggactttccttgttagctcaagagtcagtcccccaactaaagaagcaaatctacttattgggttacaactctccttcaaatgctaattatggtaagcactgggccgacaggtccggtgttttggagttgtgtgtggaccaaaccctcccaaaagattataaatttgccaacggtaactcccctgaggcgcagggctttggtcacatttgcgtagccgtcgacaatcttgagactgcctgtgagcaattggagaagaacggtgtggcttttaagaagagaccatctgaaggtcgtcaaaaagacattgcattcgctttggacccggacaactactggattgaactgattgaacaccaaatcggaaagaaggatggtgtttccaacaagagtaattgggtccttaaccacggtatgtatcgtattagagatccaaaggttagtttgaaattctataaggaggtgctgggcatgaaactttattcaacgagagagttccctgaggctaagttcactctctacttcttaggatacgagcatgacgatcagtatgttgagaaccaggaaaagccaagacctcaggcagaaagagagtctatcatcgaacttacacataactggggtaccgagtctgattcttctttcaaaggataccatactaacaccactgaacctttcggttacggtcatactggaattaagactaaggatgttgcaaagctggctaaagaattagaaaatgatgttgaatgggttttcaagctgggagaaatctctgataagttggctttttttaaggatccagacgggtacttgttggaaattttgcaaaacgactcgttcctgaaggatcagggtaataaattgtaa

SEQ ID NO: 3792 - DNA, 198 bp, Artificial Sequence
  Optimized genes for Pichia pastoris
atgcagttcaagtctatcgttcttactctggctgccgtgactgttgctcaagccaataacttgtcgaatgagtctaacggtaccaaccactccaaccatacctccagtgtaccaacaggagctgctgtcagagcatcaggtatgggtgccggcttactaggtgcaggagttgtcgctggtgttgctttgttgatttaa

SEQ ID NO: 3793 - DNA, 1056 bp, Artificial Sequence
  Optimized genes for Pichia pastoris
atggtaactaaagaatcaattatctctgatttggaaaaagagaacgtgggacctgagtttggagagttccttaattccttacaaactgatttgaactctgagaagccattgatcgaacaagttaaatctcaattagaaactcactttaatctaggcccggagacccaagaattctctcgtaagaacgacaatgctcctgtcgatcaactcttgacgaactactacaataactacgaggtgaacgtcttggagttcgttttgcaaatgggtttctgtaaggacttgtccatacctctgaacgtctggtttgtcctggatatgatttctcaattatctacatccaagcaggatctgcctttggactactatctcgttctgaataatagtcataccgggaaatactccgatttcgttagatacttaatttacgaggctgttggagctgaaatccattgtttcgaacagggtgatatgccacaacaatatcgttcctcaagatgggaagacaaagtaaagggaccagcacttgccaaccgaggtccaatccgtggaaacgttggtgctggtgacagaaagattacattccaccttttgtgcaaaaagactgccagaatgatcctagtcggcgatgaccgcgaaactgactttgagatgtcagacagatcttttgttactttgctgcttgactattaccagagagttggtaccactaagaagatcgacctgcttcttttgacaaataattatgataccaacatgaacaacaagttacaacagttgaaaattttggaatcgctaaacatgttgaagtcgaactgttacgttttggattaccagattactgctgatcaagtcaccgccaacttcaactcttacgttgagggtatacccgctttcagaagacacgagattgccaacttcctgaagaagagaaggaccccaaaaaacgcagacgaattgatctttaagtatgtgggtcgttggaatatctgttaccaaaagaagtttcaccagggtaatattagtattcatcagattagcggttatctcgattaa

SEQ ID NO: 3794 - DNA, 1347 bp, Artificial Sequence
  Optimized genes for Pichia pastoris
atgtcagcacctttgtcccccctcatccaacaaatggtttctctaatggaggccagaaccaacggtgccgaccccggtacaggaattttgccaagattgaactctgccgccgacatgctgggaggtgttgatcgtataccaagagagctgattaattacgttcagggcaagcaactagctttatttggtgactaccctagcggaaaggatactgctccatcagctatctttatggtcgtcttcttcttcatcttcctggcgcacttaaccttattcggtatcaactggtctagaggtcacaagtttttattgtcctttgggttcgctttctatgcccttctgagagtggttggttttgctttaagagtcgcatggtctagagagattaccagagttcaggttggcattgcctcggaagtattcttgattattcctacgattttgcttgcttcttttaaccttatcctggcacagaggttgtttacttggagacacccatacgtgggatcctctaagctcttttggggtgcacttttgacagtttactccgtcgttatctcagtcgtcgtcatgactatagttgctgctgtagtgccttatgtgtatttgctgtctcatcgtaactacgaaatgtctaagaatgtcgtgaaggtctctagtattctggttattttgtattcattgttggctacaggtctgatcttagttagctatttgtttaaacctacgaagagggataaaggttgcttgatttaccagccaacttggctagagtctttctccccgacatacttcccacttaaggactcggctaaacaacatgagcaaattttcatcggtagaaatggagctgctgcttttgccagtactcgtatcatcgcttcctcctatcactacaatgcccagtctgacgtattgcctgagccaaccgccgaaaacctgaagcttgagcctggtaacgaagataacttggttcgttacagttcctctactggtcaacttaagcataactactcaatcattattgtaactttgaccactactttcattttgatcggtgctgtcttcagagcaatcacttgttttttggatagaaccgttgaaacacaatcctggatctttaaacctgttgtgatgtacatgttgtggggattcttggagaccgttattaacgttatttacctccttggacgtattgatttaagattctatagaccagaccgattccccaaggatatgctagttggcaatgaagctgttgaaccaagtccagtcatatcaaacaaagaacgtactagctctatttctgaaagaacctcgaatccagagattgtccgcaccgtttaa

SEQ ID NO: 3795 - DNA, 378 bp, Artificial Sequence
  Optimized genes for Pichia pastoris
atgtctgaggaagaggaacttaaggtattcaccttcgaagaggtcgaacagcacaaggctaacgacgattgttggatcgtttacaatggaaaggtctatgacgttacttcgtatattgaggaacatccaggcggtgaggaggtcatcttggagtgcggtggtgctgacgccacagagccttttgatgatattggacattctgaagatgctcacgaaattttggccaaactgctgttagggagagtcgagggagccccagttaaagcttcagtgtcatccgctagcactgctgaagacagtggttcttccaacaatctcctacttgccgtgttggttgctattttggcaggtgttgcatactacttctttaaccaataa

SEQ ID NO: 3796 - DNA, 879 bp, Artificial Sequence
  Optimized genes for Pichia pastoris
atgccaactcagatcatggctccttgggctccagccctagctggctccattgcccgtgagctggaaaagcagcctttcgtcagctttcagttcgctaccgtagacgagcatggatctccacacgttcgtacagtaattcatcgtggatttctgtttgacgatagaagtaccaacgtcttgactttcactactgatagaagaatgactaagtataaggaactttttaatgactccgcgtttgaattatgcttctactctcacgttgccagaaagcaatttaggttgaggggtgtcgccagatgtatcgatgacaccacaacacctaaattgaaattgcctccagatatttttgatcaattgaagaactctgcagaagctactgttactctcattgctgacaacgacaatgagattgagactgataaaatcgactacttaaagttccctagatccactgcatccgatgagttagaatatccactattgtctccagaagttatcgccaagttagaggcttcatctggagaggaagggctggacccagaagaaatttccgctcaacttaccccacccaccgaggaggagtggaaaaacgagagaagacgcatatggaacacgttgtcacgatctattaagagtaccttcagaaagcccacaccgggttcacgtcttaccgaggaaaagatcaagctgttggactctattggcagaggagtggatggtgcttcggacgaggatggtttggaaaacctcgttgtcgttgttctgttcgttgataaagtggacttcgtcgatatcggttacaatggtcaaggtagacgtttgatttacagaagacttgctggtgatcactggagagaaactgcagtgtgtccttaa

SEQ ID NO: 3797 - DNA, 1380 bp, Artificial Sequence
  Optimized genes for Pichia pastoris
atgggaaaggaaaagctgcatgttaatgttgttgtcatcgggcacgttgatgccggtaaatcgactacgactggacaccttatttataagtgcggtggtattgacaagagaaccattgagaaatttgagaaggaggccgaagagcttggaaagggctcattcaagtacgcctgggtgttagataagctgaaagcagagcgcgagagaggtattactatcgatattgccctatggaaatttgagaccccaaagtatcatgtcactgttatcgatgctcctggtcatagagacttcattaagaacatgatcaccggtacatctcaggcagattgtgctatcttggttatagcgtcaggtattggggaatttgaagccggaatcagtaaggacggtcaaactagggaacatgctttgctcgcttttaccttgggtgtcaagcaattgatagtcgccatcaacaaaatggactctgtgaaatggtctcagaagcgttacgaggaaatcgtaaaggagacttccaactttattaagaaagtcggctataaccctaagaccgtgccgttcgttcctatttccggttggaacggtgataatatgatcgaaccatcttccaattgtgactggtacaagggttgggaaaaagagactaaagctggtggtgctactaagggtaagacattgttggaagctatagattcgatcgatccaccttctagaccaaccgacaagccattgaggcttcctttgcaggatgtttacaagatcggtggaattggtactgtcccagtaggtagagtcgagacaggagttattaaagctggtatggttgttacttttgctcctgctggagtgactacggaggttaagtccgtcgaaatgcaccacgagcaattagagcaaggtgttccaggtgacaacgtgggattcaacgtcaaaaatgttagcgtaaaggaaattcgtcgaggaaacgtttgcggagattctaaaaatgatccccccaaagctgccgagtcttttaacgctcaagttatcattttgaaccaccccggccaaatctcagcaggatacgccccagtattagactgtcacacagcacatatcgcttgtaagttcgatgaactgattgagaaaattgacagaagaacaggcaagaagaccgaagaaaatcctaagttcattaagtctggtgacgccgcaattgttaagctagttccatccaagcctatgtgtgttgaagccttcactgactacccaccactgggtagattcgccgttcgtgacatgagacaaactgtggctgtaggagtcattaaaagtgtggtcaaaaccgataaggctggtaaggtcaccaaggctgctcagaaggcagctaaaaagtaa

SEQ ID NO: 3798 - DNA, 1674 bp, Artificial Sequence
  Optimized genes for Pichia pastoris
atggctccaacagccatagacctacaacaggtttcagacgaggactatcaaactaaaatcaagaaggctacttcgcccagctactctgtgatcgcatccttgggtttgaatccagaggcagttatacgacataacgccgcggttccaaccctttatgaagatggacttctagagaagggtacagccatctcctctacaggtgccttaatggcctattctggtaagaaaaccgggcgttctccaaaggataagcgtattgttgacgaagagacatctacggaacatatttggtggggtcccgttaacaagaaggttgacgagctgacatggaagatctcaaaggctcgcgctatcgactacttgagaacaagagaaaagatctacgtcattgatgcattcgctggttgggaccctagatataggattaaagtcagagtagtttgcgctagggcctaccatgctttgttcatgaagaatatgttgattagaccaactgaagaggaattacaaaatttcggagaaccggatttcactatttggaatgctggtcaatttccggctaacgtccacactaagggaatgacttcttcgacctccgttgaaattaactttaaatccatggaaatggttattctgggtactgaatacgctggagaaatgaagaaaggcatctttactgtcatgttttacctcatgcctattagacacaaggtcttgaccctgcactcttcagccaatcaaggtgtccagaataaagatgttaccttattcttcggattgagtggtaccggaaagactactctttccgctgatccaaacagaaaacttattggggatgatgagcattgctggagcgacaatggagtctttaatatcgagggtggttgttacgctaagtgtcttgatctttctggcgaaaaggagcctgaaatttttaatgccattaagttcggctccgtcctggagaacgttggttacgaccctgtcaccaaaattgttgactactacgataaatcgattacagagaacaccagatgtgcatatcctattgattacatcccatctgccctaataccatgcaccgtcgactctcacccaaagaacatcgtactcttgacttgtgatgctcgtggtgtgttaccaccaattagtaagttgactaacgctcaggttatgtaccacttcatttccggatatacttccaaaatggcaggcactgaggatggaatcacggaaccagaggccaccttttctgcttgtttcggtcagcccttcctggtgttacaccctatgaagtacgcccaacaactgagcgacaagatgattcaacacgagtcaaccgcatggttgttgaacactggttggactggatccagtgctactaaaggtggatctcgttgtcctttgaagtacaccagaagaatcctcgactctatccattcaggtgaattggctaaagctgaatacaagaattatcctacgttcggtttgcaaatcccaaaagaggtgccaggtgttccaaccgaaattctggatccttcaaacaactgggttgatggtaaggacaactttaacactgaggtaagaaacttggctcagctttttatggaaaacttcgagaagtatgctagtgagtgtacaaccgaggtgatccaggccggtcctcaattgtaa

SEQ ID NO: 3799 - DNA, 1071 bp, Artificial Sequence
  Optimized genes for Pichia pastoris
atgacctttttcagaagaagcttgcaaagttctaagtctaattctactacgtctatctcgtctctgtacgctacaccaaactccgtcgacactcttactccagaatttgttcctgaggttattgatgatgaattgaactcactgcatttcaaattcactaactttgctctggacgacgaagttgtcgacatcgcatctgagacagctactgaagcatctggtgtggctacgatgaaaaccagtccttcccttagaaccggctcagatgttaagtggtgtgtgctgttggtgggattgcctgcctcaggtaagtctactgtcgtcagacaattaaagcagtacctaactaccggtacaaagcaaaagtgtcgtgtagagatttacaatgccggtaacgttagaaggtctcaacacccaaaacgagccgactccggattcttcgagttcgggtcaacatccaccaatggacgcttgagagagacttttgctagagacacattggcaatgctattgggtgacctacagaacgatcacgtcgatattggtatccttgatgccaccaattcaactcgtgaaagacgtaaaagtctcctggaacaaatccatgctgtttccccttccactaacatccaaactttaatacttgaagtacagtgcactaacaagtcgatgagaagatttaacatcgaaagaaaggctcaaaacgccgattatattcatattcctcgtgacgtagccgttaaggacttcttcaacagggttcaggtctatgagtctcactttgagccagtgagtgcccaagaattggcttccctcaagttaccatacttgtcaatgattaacgtcggtgaggaaattatttacaattttgagaatgcaaagcaaaccgatttctcccttgaagatcccatcttcttgctgatttgttcgtttgttaccgagtacagaacacagtacgctccaacttatttgatgaccttgaaatctttctatgctagcgagtacgcgccgttggtttccaccccattagcttttgctgccacttctgctgagaccgcttctactcagtaa

SEQ ID NO: 3800 - DNA, 3966 bp, Artificial Sequence
  Optimized genes for Pichia pastoris
atgtcctccgaaaaggaaagtccatctgaatctaaatcttctcaggttttgaatatcccaaagaatgagcgagtgagattaactgttagaaatctgcaagttaccttgaaggcccaaaaaaagaagcagtctttgttgaagagattaagaaaatccgagaaggacaacactattgatgaagaggctttgccacaaaagaaaattatctctaacgttaatttggatttgaaggaaggagaattaattgccattctaggtgctagcggttctggaaagactaccttgcttaacacgttgagtcaaaaggttactaagaacaaatcattcttgttttcgggtatgataaagtacaacgaaaacacagacattgagcgtatcagacatgcttacatgtcccagacagacttcttcctaccaaacctgaccgtttacgagaccctagattacgccgctaagttaaagttgccacgtaactatactaatgctgagagaaccgagttagtcgaatctatccttgttgaactgggcttggaccgcatccgtgagtccattatttgtaattcttttggttctatctacatatccgggggggaacaaagacttgtatcaatggccctgcaattgctgaacaagccaggtttgctcttcctcgacgagcctactacaggtttggatgccacatccagtttcagaatcattacagcacttcacaaactcagcagaaacttcggtatgacaatcgtacttactatacatcaaccacgatatgagattttggagcaaattgatagaatttgcatcttgaccagaggatgtagggtcatctacaacggtagtccgctgaactcaatcgagtacttcaagaacattggccacgatattccgaggaacgttaacttaaccgattaccttttggacatttcctgtaaggacagttcttctcctgaaaacgaatcacaatcacttgccagaattgagtacttggcatccaagtgggaaaagcatgaaccctctactctcgatgagggggtcgaagtgatggactccttcactcacagttccaactctgaaaaggccttgaccgagattgagaagagaattaccttgattaagcaaattaggatattaacgaaaagaaccttcatcttgtctctgagagaccgtggcagtatgctaacttttaacttctctattttgataatgggagtcgcatgtggttggcttttttttaagccacctgctgatctaggtggcattagatcaattgtttcccaggtctacgtggtcctggagttgatcggttttgtgcccatgattttggaaattacccgcttatgggatttcgatggacaagccttcctgagagagaactccgagggatacgtgtctgtaactggatggattatttcgagacgtctcgctaagttcccaatcgaagatttccctacctcaatttttttcgcactcatcacttactttatgttcggcctccgtacagacaacggtgcatccaacttcttgatctactttgttgtgaccctttttgtcaacttgtgtgctgtcgcattggctactttgtgcttcgcagtcggctccgactttgcttcttcatctcttatgtgcaacgttatttatcagcttcaaaattcttcctgtggctacttcattaacgccaagactatgccagtttatgtcagatggctgaaatactgcgcacacttctggtacgcttttggttgtcttatgagcaaccagtttacagactggatgggtgattgtcctactgaaggtgacgcctgcgtcgaatactccggtatctaccaattggagatcttcggtttcggtgagaattggattactcttccaatttgtgtattgttggcttttttcctaggtaccttggtcttgtctggatttatcctaagatacaaaaacacggaggtgtcaatgagcaaggagatcacctctaacatgttctccaagagatctaaagatagaaagaagcacgaggagaaagatgttccagctgatgacaattttcacgccattagtacagctcgtcgggagatttctctgaacctgtacgtttcgaatgtttctctatatgtgtatccatcccgtctaaacctcggtgttttcacaatcctttggaaatatatcaataatagatatttgaagtttggagtcgaaaaagttgagaatacacccaagtcagctaaatctaagaggttgttaactaatgttaatgctaagttcattcctggaagacttaacgcgataatgggaccatcaggttctggtaagtctaccctgttaaattatatcgctggtcgtctgtcaaaagaaagtaatttctataccactggggaagttatcgttaatgatattgcaatgagaagcatggacaaacctctgaagaaactatgttcgtatgtattacaaaacgactcagccttgatcccaactctgaccgtaagagagactgttcactttcaggctcaacttagattacccaaggagaaacaaatcgacggtggtattgaccgtattatcgatgatctgctgttgaaattcggcttacttgattgtcaaaacatcccaatcggtgacgattacactaagggtattagtggtggtgaacgtaagagagtctctattgtcgtccaactgttggatgactccaagattctcttgttggacgagcctacttccggtcttgactcttttacttcctccagtattctgtccacgttggaagagtacgccattgagcaaaataagttgattataatgaccatccatcagcctaaaaaagaaatttttgagaagtttggaaacgttgttttgttagctagaggtggttacgttgtttataacgactctgccgtcaagattgctgattacttctcgtctttgggatatgacgtgccacctatgactaacgtcgcagattttgtcttagatatggtatcaaataatatcgatgaacgtccagaagaatctgacgctagattgagacgtctggtcgaaacttggcaggagaaccatgaatctgacttccaaagggttcagactaacacgaccatcaagatctcaaatgaagaccaatttgatgctcagttttcacacttgtaccagaacagggctgcggataatgtctctttgccagtcttaattaaaagactaactttgacaacctttagagatcagggagttgtggctgctcgtttgtaccaagttatggccctttgcgtcattcatgctctattttatgccccacttaagaacggagccgacggtatatcaaatagactaggactgattttccaagtattgaacttgtactacgccggatttattaacaacatttcattatttcctcaggttaagcaattgttatacaacgaatgggaggatcaaatttattcgcttgaatctttctttgcttcctacttcctgttggagatccctttcgagttgttctgttcttttttatacgctgtgttccttgttatggtcatcggtttgcctagaaccgctggaatgctgttcactaccttttatgcttcttttgtcgcaatgaactgtggtgaatcgttcggtattctgtttaatactttattcaataagctggatgtggccattaacgttctttctaattgtcttatcattggtatcttcatggctggagttatgagcatccatatgcctgaatttttcaaagcttggaactggatcaaccccctcaagtatattgttggtgttgttgccaagttgggattcgctggtcagactttcaagtgtgagatcggagacgagtgtgctttgagcactggtgacgacgttttgagatattatcgattggaccacaacttctcggctttcatgggtgctcttgcagtttgctttgtggtttacagatttgtatcctacgtcttcttggccatcagattgaaaatgtcctaa

SEQ ID NO: 3801 - DNA, 1212 bp, Artificial Sequence
  Optimized genes for Pichia pastoris
atggctggtaacctcaaagatattctttccttgtcaagaaagaccgctagaaacctgaaacaggcccttgacgaacttgcggagcaggtaatcaatcaccaaagacgtagacctgcactagttcgcgttccaattaataacaatctgaggaggaagtctcaacagtctttcttgaatagacgttcgtttcacctgtggactagtaagtacaatccatatttttggagaggtggcagatccaacgtcttggaccagttgaacagagaagcattgaggtaccgttcatctttcgccaagcctggtttttacccgtccggactctaccagagtactttcccacaacgtggatccagaatgttctcaacctgtgcctattcctgtcaacaggaagcagttaagaatttgacttctgctgttcgtgccttattgcaatcaggtgctaacttcggatcacaaatgaaacaaatgaagcactgttctcaaaaaaagaagcacttttctaaattttctaagagattgacgtcttccaccgctgccggttccggtaagaacgccgaacaggcacctagtgggctagctgaaggttcagctgttgttttcagtttggagagacagtcccataacactgagttggaaggtattctggaccaagagacttccagcattctggaggaagaaatggtccaacacgaaagacatctggctatcatacgagaggaaatccagcgtatcagcgagaacttaggttcgttacccttaattatgtcaggacataagattgaagtatttttccccaactgcgatactgtgaagtgcgagcaactcatgagagaccttgctatcactaaaggtgtcgtcagacgacatgatagtaccgccgagcattcttcttcaagatctttcgtgccagaggattgtttgtactcgtctggctcttcttctccaaacccattgtcctccacctcttctaagtcctttgaccgtgtctccctagattatatttcttcgagatctacctcagatcaaaccacaggaagcgaatacacatctttgagccaacaataccacttagttagtaactataatcctgttttgtcgtccgctccaggttcctctagagttcttgagttaaacactcctgagtctactatggagggatcaacagacttggaatacttgacacgggatgacgtgcttctgttgaatgtctaa

SEQ ID NO: 3802 - DNA, 336 bp, Artificial Sequence
  Optimized genes for Pichia pastoris
atgctcattcctaaggaggatagaaagaagatacaccaacatctgttccaagagggcgtggttgtcgctaagaaggactttgagattcaacacgaagagatcggtactaaaaatctttacgttattaaagccttacaatctttaacttcaaagggttacgttaagacccagttctcttggcagtactattactattccttgaccgatgacggattggaatacctacgtgagtatttgaacatccctgagggtatcgtcccaaaaacacttttgcaggaaccagtacccgaaagattgccaagaagaggtggagaaaggagatttactcgtaactaa

SEQ ID NO: 3803 - DNA, 717 bp, Artificial Sequence
  Optimized genes for Pichia pastoris
atgaagttgaatatcgccttcccagcgaacggaacccaaaaatgcatagagattgatgatgaacacaaattacaggctttttacgaaaagcgtatgggtcaagaggtggagggggactctgtcagtgatgagttcaagggttacgtttttaaaatcactggtggtaatgataaacagggctttcctatgaaacaaggtgtgatgcaccccacaagggtgcgtcttttgctctccaagggtcactcgtgttatcgtcctagacgtgttggagagagaaagcgtaagtccgttagaggatgtattgttgctgctgacctgagcgtcttgtctctggtcgtcgttcgacagggtgaacagcagattgaaggattgaccgacgcccaagtacctaaaaagcttggtccaaagagagctaacaacattagaaagtttttcggcttaactaaggaggatgatgtcagacagttcgttatccgcagagaagttgtaaagggtgacaagacgtacactaaggccccaaaaatccaaagacttattaccccagaaagaattcaaagaaagcaacatttgagggaactaaagtacgagaatgctagacgtcaaaaggacgcagccgctgaatatgcaaagttgctggctgaaaagatccatcaaagaaacgctgagaaagcagagattaagaaaagaagagcctcttcattgagagctgaggcctaa

SEQ ID NO: 3804 - DNA, 2493 bp, Artificial Sequence
  Optimized genes for Pichia pastoris
atggtaaacgagaagaagcctcttctggatgcatccggtacagaaaatggaccagaggatctgaccgcaaccgccattttaagaaaaaaaaagaaggacaatgcacttatcgtggacgatgccatttctgacgacaattctgtgatcgggatgagcagcaataccatggaattgttgcagctgttcagaggagataccgtcctggtcaagggtaagaaaagaaaggatactgtcttgatcgttttggctgacgatgatattgaagacggtgcctgcagagtcaaccgtgttgttagaaacaaccttagagttcgtttgggagacatcgtcaccgtgcacccctgtccagacattaagtacgcctcccgaatctctgtcttaccaattgctgacactatcgagggactgaccggtagtctattcgacgtttatttaaagccatacttcgttgaagcttacaggccagtgaggaagggtgacactttcacagttagaggcggtatgagacaggtggagtttaaagtcatggatgtagagcctgatcagtacgccatcgtggcccaagacactgttattcatagcgaaggtgaaccattgaacagagaagatgaggagaacaacattaacgaggttggatatgatgacattggaggttgtagaaagcagatggcccaaattcgtgaactagttgagctcccactgagacacccacaactctttaaagccataggtatcaaaccgcctaaaggcatattgatgtacggtcctcctggaactggtaagactttgatggcaagagctgtcgccaatgaaaccggagcttttttttttttaatcaatggtccagaaattatgtctaaaatggctggagagtctgaatctaacttgcggtcagctttcgaagaagctgaaaagaatgctccttccataatttttatcgatgagatcgatagtattgcccctaagcgtgacaagacaaacggtgaggtcgaaagaagagttgtttctcaactgcttactcttatggatggaatgaaggctagatctaacatcgttgttatcgctgctaccaataggcctaactcaattgatccagctttacgtcgttttggaagatttgacagagaggtcgatataggtattccagatgttaccggtagattggagtgtttgagaattcacactaaaaatatgaagcttgctgaagacatagacttggaatcgattgcccaagagactcatggttacgtgggtgccgatattgctagcctatgttccgaagctgctatgcagcaaattagagaaaaaatggacttgattgacctggacgaggataccattgatgccgaggttttggactcattgggagttactatggagaactttagattcgccttaggtaattccaacccatctgccctgagagaaactgtagttgaatctgtcaacgttacttgggacgatatcggtggtttagactccattaagaacgagcttaaggagactgtcgaataccctgtgttgcatccagatcaatttgccaagttcggcttatccccatccaaaggagtcttgtttttcggacccccaggaactggcaaaacacttttggccaaggcagttgctaccgaagtatcggcgaatttcatttctgtcaagggtcctgagttgcttagtatgtatttcggggagtccgagtctaatattagagacattttcgacaaggctcgtgctgcagcgccaacggttgttttcctggatgagttggactctatcgctaaggctcgaggaaattccctcggtgacgctggtggagcttcagatagagtagttaaccaattgctaaccgagatggacggtatgaacgctaaaaagaacgtcttcatcattggtgctacaaacagacccgatcagattgatcccgctatcctaaggcctggtcgtcttgaccagcttatctacgtcccattaccagatgaacctgctagattgtcaatcttgcaggcacagttgagaaagtcccccattgaaccgggtctagacctccaagaaattgctaaaatcactaagggattctcaggtgctgatttgtcatatattgcacaacgagccgcaaagtttgctattaaagactctatcgacgcccaaaaacgtctgttggaggagaaggccactcacaagttggagtcatccgaagatatcgaaatgactgaagctaagcaagatggggaagaagtagatgatccagtccctttcatcagtcacatccatttccaagaggccatgaagacggcaaagaggagtgtgtctgatgctgagttgagacgctacgaggcttatgcccaacaactgcagtccagtcgtggtcaattcacagactttaagtttaacgatctcggcgaatctgctggtaacggtggctcaattggtgcagagtcgtctggtccagctttcggtaacgttgagcctgacgatgacgatttgtactcgtaa

SEQ ID NO: 3805 - DNA, 402 bp, Artificial Sequence
  Optimized genes for Pichia pastoris
atgtctgcaccaactgtcgaagttgaagaattgaactggagattggttgaggttggtagagtcgtattaatcaacaacaagcttgcagctattgttgatatcattgaccagaagagagttctggtggatggtccttccaccgatgtcgagagacaagttgcccgtctccaggatattgagctaacattcttagtgttggactctgtttccagaggtgacaattcagatgctgtcaaggaagcttgggatgcctctgacatctcgtcacaatgggcttccagtgactgggccaaggacattgctcaaaagcaaagaagaagcgagctgaatgattttgagcgtttccaagtccaattgcttcagaaacagaggtctttggccataggatctgctgctaaataa

SEQ ID NO: 3806 - DNA, 1422 bp, Artificial Sequence
  Optimized genes for Pichia pastoris
atggttgaaggaaatgtgcttgtcatctccaacagagttcctgtaaccatcaagaagggttctgacggtaactaccaatacaacatgtcttctggtggtttagtcactgctttgcagggattgaagcagaaatttcaatggtttggatggccaggtttggaagttcctgccatcgaccaggaaaaggtcaatagcgacttgaaagagaaattcaactgtttccctatttacttatcagatgagattgccgaattgcactacaatggtttctctaactccattttgtggcctttgtttcattaccacccaggagaaatgaactttgatgaagctgcttgggctgcttacatcgaggcaaaccgtcaattctgtaaggttattgtcggtaagattgctgacaatgaccttgtatggatccatgattaccatttgatgctgttgccacagatgttgcgtaggcaaattgacgaacaaggtctgaagaacgttcgtttagggttcttcttacacactccttttccttcttcggagatctacagaatactccccgtcagaaaggaaatcctggaaggtgttctatcttgtgatttgatcggattccacacatatgactacgccagacatttcacctccagcgttgagagaattcttgggtgcagaaccactccaactggtcttacttacggatcacataatgtcagtgtaggcgcatatccaattggtattgatgttgacaagttcactacaggtatcaaacagcacttggtccaagaacgaattcactccttgcaaaagcgtttcggtcaaggagtgaagctgattgttggcgtggatagattggattatatcaagggcgtacctcaaaagttgcatgctttcgaaattttcttgcaggagcatccagaatggattggaaaagttgtccttgttcaagttgctgtcccctccagaggtgatgtcgaggaatatcagaccttaagggcaacagtgaatgaactagttggtagaatcaatggacaatttggtaccattgagtttgttccaatccacttcatgcacaagtctgtgccgtttgaagagttgatttcactgtatgctgtttccgacatctgcctggtgtcaagtaccagagatggtatgaacttggtttcttacgagtatattgcttgtcaacagcaaaaaaaaggttcactaatactgtctgaatttgctggtgctgcccaatctttgaacggtgccatagttgttaacccatggaacactgaagaactctcggaggccatttatgaggctcttagtttaccagaggagaagagagagtcttcctttgagtcaatgttcaagtacatttccaaatacactgcagcctactggggtgagaattttgtcaaggagcttacgcgcgtcggaaacaacatgtaa

SEQ ID NO: 3807 - DNA, 2691 bp, Artificial Sequence
  Optimized genes for Pichia pastoris
atgtctgcagaagagccaaccaaggagaaaatcccaatcaaccattctgatgatgaagacgaagatatcgaccaattgattgaggatttgcagtctgttcatggttttgatgacgaggaagaggaggagcaccatgagggagcaaccgctaagccagttccagaggaattgctacagacagatccagcctatggtcttaccactgatgaggtccacaaaagaagaaaacgatttggtgaaaacaaaatggccgaggagaaggaaaacttgctagtgaagttctgtatgttctttgtgggacctattcaattcgtcatggaggccgctgcaattctggctgccggcttagaggactgggttgacttcggtgtcattcttgcactactgttcttgaatgcctccgtagggttcatccaagagtaccaagccggttccattgtggatgagcttaagaagaccttggccaactccgctaccgttatcagagatggtcaggttgtggacatcctagctgatgaagtcgttcctggtgatatactcaaacttgaggatggagtagtaattccagctgatggtagactggtttctgaagaatgtttcttacaggtcgatcaatctgctatcacaggagaatccttagctgttgataagaagactggagactctacttactcttcctcgactgttaaacgtggtgaggcttacatggttgtaacagctactggtgactcaactttcgttggaagagcagctgctttagtcaacaaggcatctgctggtcaaggtcatttcactgaagttctgaatggtattggtactattttattagtgcttgtaatcgcaactttgttggttgtttgggttgcttgcttttacagaacttctcctatagtcagaatcttgagatttacgctggccatcaccatcgtgggcgtccctgtcggattgccggcagtggtcacaacaactatggctgttggtgctagttatcttgccaagaagcaagctattgttcaaaagctttcagcaatcgagtctttagcaggtgtcgagatcctgtgttctgacaaaacaggaacattgaccaagaacaagttgagtttgcacgagccttacactgttgagggtgttgaagctgacgacttgatgctgacggcctgcttggcagcaagccgcaagaaaaagggcttggatgccattgacaaggctttcctcaagtccctgatctcgtatccaagagccaaagctgctttaaccaaatacaaggttattgaatttcaaccatttgaccctgtttccaagaaggtcactgcttacgttgaaagcccagaaggagagagaattatttgtgttaagggtgccccattgtttgtcttgaaaactgtcgaagaggaccatccaattcctgaagatgttcacgacaactacgagaataaagttgctgagtttgcttccagaggattcagatcattgggtgttgccagaaagcgtggccagggtcactgggaaatccttggaatcatgccttgtatggacccgcctagagacgatactgctcaaaccgtcaatgaagccacccatttgggactcagggtcaagatgcttacgggagatgctgtcggtatcgctaaagaaacttgtagacagttaggattaggtaccaatatctataacgctgaaaggctaggccttggtggagctggtgacatgccaggaagtgagattgctgatttcgtggaaaatgcagacggatttgccgaagtattcccacaacacaagtacaacgttgttgagattttgcaacaaagaggttacttggtcgctatgaccggtgatggcgttaatgacgcccccagcctgaagaaggccgatacagggatcgccgttgaaggtgcaagtgacgctgcgaggagtgctgccgacattgtcttccttgctccaggtttgtctgccattattgatgctttgaagacttcacgtcaaattttccacagaatgtactcatatgtggtttaccgtattgctctctccctacacttggagctgtttttgggtctgtggattgctattatgaacagatcgttgaacatcgatcttgtggttttcattgccatcttcgctgacgtggccactcttgctatagcctacgacaatgctccttattcacccaaaccaactaaatggaaccttccaagattgtggggtatgtccataattctcggtatcattctagcgattggaacttggatcactttgaccaccatgttgctgccccgaggtggtattatccagaactttggttctgtcgacggtgttttgttcctggaaatttctttgactgagaactggttgatctttattaccagagctgctggaccattctggtcatcttgtccatcttgggagttggccggcgcagtcatcattgttgatattatagcgacaatgtttaccttatttggatggtggtctcagaattggaccgatattgtcaccgtagttagagtctggattttttctttcggtgtgttctgcgttatgggtggtgcttattatttgatgtcagagtccgaaggtttcgaccgtctgatgaacggtaagcctcgtaaggaacctcctccccagcgttccatggaagactttatcgtcgccatgcaacgtgtttccactcaacatgaaaagtcggggtaa

SEQ ID NO: 3808 - DNA, 6210 bp, Artificial Sequence
  Optimized genes for Pichia pastoris
atgtccgcaacttccggtgttgtcaacagaccactggttttaaaccatggatccattgagagcaccattttaatcccaactactgaataccatttctaccagactttgttggagggattccgtaaatcattgccacaagtaacagaaggtttcgccgacgacgatgagccttcttcgaaggctgagcttctgatgaagtttttgggctacatagttcagagtggggtttcaaaccagcaggaacagcttgccgctgctaaactggtgctgaatgagttcgagagtcgttttctgcagggtttgaacttacactcttacgccgccatcctgttgaagtctgagacattccctacaactcttttgaagataaaagaaaaccttatcaagaactactacctgggcagggcgctcgtttatttgccgggacaacgtggtttggtttaccctccatctgctttgctcaatgccggaaagtcgggctctgctcaaatctatgctattttcggcggtcaaggtaacaccgatgattatttcgaagagttgagagacatctaccacatttatcaaggactagtaagtgacttcgtcactaaggcacagctaaagttgcaagaactaattcggacaaccccagagactgacagaatctacactcagggtctagatttgatcaactggttggagaataaagataagacacctgatcagcaacaattgctgagcatccctatgtcttgcccattgatctgtgttattcagctgtgtcactacattgttacctgcagaattttgggtatcactccaggtcaactcagagacagtttgaaaggtactaccggtcattctcagggtttagttaccgccgtcgtcgtttcttctgcagactcctgggagtcttttgaaaagttggccttgcaagctgtggaattcatgttctatattggggtccgtggacttcagacctatccaaacacttcactgccaccatctatcgtccaagattctgaggagaacgctgaaggaaccccttctcccatgctgtctgtcagagatttgtcctatgaccaacttgttaaatttgttaatgaaaccaaccaacatcttccagaagcaaaacacatcgatatatccctcattaacggtcctcgtaacgtcgttcttacaggtccacctcaatccttgtatggtcttaatcttaacttgagaaaagccaaggctccaagtggtctggaccaggctcgtattcctttctccgagcgtaagttgagattcagtaatagattcctgcctataatgagtccatttcattcccatctgctttctccgtcaactgaaaaaattgttgccgatctgaagaaagctggtgttgagttctcacaaagctccatgaaattacctgtcttcgacacttacgacggcaaggacttgcgttcctacagtggatctattgctgcacgtttggtcgaatgtattactaaactgagagtcaactgggagctctccacggaatttaactctacccatgttcttgatttcggaccagggggtgcatctggattgggtgtgttgactcacagaaacaaggagggcaccggatcaagagtcattgtagccggtgtcctggatgctgagagtgaagattcggagtttggttacaagcaggagatctttgaatcgaacgagaaggccatcaagtacgctccaaattggcttaaggagtataagcccaaattggtcaagaccagtgcgggaaaaatatttgttgacaccaagttctcgaggctacttggcagagcacctttgatggttccaggtatgactcctaccactgtctctcctgactttgtcgccgccacattgaacgccggttttcacactgagatcgctggtggtggttactttgctccttcgatcatgaaggctgctctgcaaagagtgattgatcaagtcacaccaggtaccggggttggtatcaatttgatttacgtcaacccaagaatgttgcaatggggtattccgatgattaaggaacttagagaacaagggttcccaattcagtctttgtctataggagctggagttccttcactcgaagttgccaccgagtacattgaaaccttaggtctcgcccatttgggattgaaaccaggaagtatcgacgctgtcaatcaagttatcaccatcgctaaggctcaccctaacttcccaattgtcttacaatggactggcggaagaggaggtggacaccactcctttgaagacttccaccaaccaattctacagatgtattccaaaattagaaagtgcaagaacatcatcttaattgctggttcaggattcggtagcgcagaggatacttacccatacctaaccggttcttggtctcatcaattttcgtaccccagtatgccatttgatggtgtcttgtttggaagccgagtgatgacagccaaagaggctaagacttctcctgcagccaagcaagccattgctgattgtactggtgttgacaattctcaatgggaaaacacctacaagaaacctactggtggaatcattaccgtgcgttctgaaatgggtgagccaatccacaaaatcgccactagaggtgtaatgttgtggaaagaattggatgacacaattttcactttaccaaagaacaagatgcttgaggctatcgccaagaagaaggactacatcatcaagaagctgaacgctgattatcagaagccatggtttgcaaaaaatgagaagggtacttgtgatcttgaggacatgacttataaacaaattgccgagagattggtagaattaatgtacgttcgaaagtcccaaagatggattgatgtgacactgaggaacttcactggtaagttccttcgtcgtatcgaggagagatttgctaccaaagttggaactatcagccttattcaaaactttagccaactggaagagcccgaaaaggcgattgactcagtgttcaaagcatatcctgaagctgcctcccagttgatcaacgaagaagactgtgactggttcttgttagaggcccaatctccaacccaaaagccagttcctttcattccagtattagatgaaaggtttgagtttttcttcaagaaggattcactttggcaatcagaggaccttgaagctgttgtcggtgaagatgtccagagaacttgcattttgcacggacctgtagcagctcagttttccaacaaagtcgatgaaccaattaaagatatcttggagaacattcacaaggggcatataaagagcttagtaaaagaggtctacaatggtgacgaatcaaagatccccgttgttgagtatttttcttccgtggactctttctctgatactgccattgaaggtgttaagattgagcgctccagaaacactgagacctttactgttacatctggtaacgttgacaaccaacagtggtttgacttgcttgctggtaaagagttatcatggagaagagcctttattactgctgctagactcgtgcaaggtaccaatttcgtatctaacccagcccactccgtattagctccctccaaggatttagtggtcaagattgagaacggatctgacgccaagaagacggttttgaccgccttccagcgtgttagaggtaagtatgtcccagctgtcagtctgaaatcaattggagatctcaagatcaaattggaattgatagagaccagaaccgctgacaagtctgctgttgctctagagctgttctacaactacaaaccaactgatggatttgccccaatcttggaagtcatggagggtagaaatacctcaatcaagaatttttactggaagctatggttcggtagttcagtccctgttgatctagacttcgatgccaacaagccaatttccggaggagaagcctctgtttcgtcgcaggcaattgccgaatttacccacgctgtaggaaattcgtgtgaagattttgtacctcgagcaggtagacctcagttagcaccaatggatttcgcaattgttctcggctggaaggctattatgaaggccatttttccaaaaaccgtcgacggtgatatcttgaagcttgtccacttatctaatggatacaaaatgttccccggtgctgaccctctgaagaaaggtgacgttgtgtctactgttgctcatatcaggtctgttgttaacggtgagactggtaagactgttgaagtagtcggagtcatctctcgtgacggaaagcctgttctggaggttaactcccaattcttttaccgtggtaagtaccaagactttggtaattccttcaaaaaaacaactgaaactccagttcaagttgctttcaagtccgctaaggacattgctgtcttgaagtctaaggaatggttccacttggagaaagacatagatttgttgaaccagactttgactttcagatgtgagtcatatgtcaagtttaagtcttcaacagtctttgcttccgttaagaccaccggccaagctcttttagaacttccatccaaggaaattatccaggttgctgaaattaattacgagtctggttcctcatacggaaacccggttttggattacttgacgagacatggttctactattgaacaacccatcatgtttgagaatgctattccattggctcaaggtacagagctaacgtctaaggctcctggaactaatgaaacatatgccgcagtctccggtgactataatcctattcatgtcaataaggtgtttgcttcttatgcaaacctcccgggtactattacgcacggtatgtactctagcgctgctgttcgtgctttggtggagcaatgggctgcccagaatgtcgctactagggtcagagctttcaaggcagattttgtgggaatggtccttcctaatgatgagttggttactcatttggagcacgttggtatgattaatggtagaaagattattaaggttgaaacgaagaaggttgaaactgaggaagttgttttgattggtgaagctgagattgagcagccagtctccacttttgtattcaccgggcagggatctcaagagcaaggtatgggaatggacttgtacaactcatccgaggtcgcaaagtccgtttgggacagggctgatgttcacttcatcaacaactacggtttctctatccttgacattgtcaagaataaccccacagagttaaccgttcattttggtggtgccaagggtcgatccatcagaaacaattacatttcaatgatgtttgagactgtggctgccgatggtcagctaaaatctgaaaagatcttcaaggagattaacgaggataccatctcattcacatttaaatctccaacgggtttattgtcagctacacagttcactcaacctgctctgaccttgatggaaaaagcttcatttgaagatatgaaatccaagggcctagtgccgtccgaatctatgtttgccggccattcactaggcgaatatagtgcattgacctctctgggtgatgttatgcctatcgaatctcttgtggatgtagttttctacagaggtatgaccatgcaagtggccgttccaagagatgagcaaggaagatccaattatggaatgatcgcggtgaacccttccagagtttcttccaccttcaacgactctgccctgcgtttcgttgtagagcatattgcacaacaaacaggatggttactggaaatagttaactataacgtcgaaaatacacaatatgttgccgctggcgatttacgcggtttggacactctttccaacgtattgaatgttttcaagattcaaaaaatagatattgtgaaacttcaagagacgatttcgttggacgaggttaaagtgcacttgtcagaaatcgttgatgaagtgtcaaaaaagtccagtagcaagcctcagcctattgacctagaaagaggtttcgcttgtatccccttaaagggaatttctgtgccattccattcgtcttacttaagatctggtgtcaaaccctttcaaactttcttgtgtaagaagattcctaagtcagcagttaaaccagctaacctgatcggtaaatacatcccaaacttgactgctaagccattccaactgacaaaggagtacttcgaagacgtctatgaattgaccaagagtgagaagatcaagcacattttggaccactgggaagaatacgaaagttcctaa

SEQ ID NO: 3809 - DNA, 1755 bp, Artificial Sequence
  Optimized genes for Pichia pastoris
atgtctgataagaagacttcagttgaagctgtaatcactgaagttgactcttctccagcttacgaggccggttccattaagtccgagaacaagagaaactttgttcaaaactggttcgacggttttaaaccttatgaaatggaagagttggatcctaacctcagtgaagtcgagaaggccgctattgctacagccaacgctccattacagcgtaaattgaagaacagacacttgcagatgatcgccatcggtgggtccatcggaactggattatttgtcggttctggtaaggcacttgcagcagctggacctgcagccctccttattgcttggggtttgactggtatcatgatttacttcactgttcaggctctgggcgagctgtctgtcaccatgccagtttcgggatcatttgctgtctactctacgcgtttcattgacccatcttggggatgcgccatgggattcaactatgctatgcaatggttaattgtgttgccattggaattggttgctgcaagtatcaccctttcttactgggaaggctccaagagtgtcaatgctgatgtctgggtccttatcttctacctgttgattgttgttataaatttgttcggtgttaagggttacggtgaggctgagtttgtgttttctttgatcaaggttatcacagtgatcgcttttattttcatgggtatcattctgaactgtggtggtggaccaaagggagaatacatcggaggccgttattggaagaatccaggtgcctttaacaccgagtacaaccctttcaaagcagtctgctcagtgttcgtcacttctgccttctccttcgctggtactgagctagtggggctcgctgccgctgaagccacaaacccaagaaagtcgcttcctaccgctatcaagcaagttttctggagaattatgttgttttacattatttcacttacactaataggcctactggttccattcaatgacccccgattgattggaagcagcagcgtggacgcttctgcttcccccttcgtaattgcaatcgtgtccaatggtattcatggtttggactcagtcatgaacgttgtcatcatgattgccgttctgtccgttggtaactccgctgtttacggaagttccagaatcttgcaatctctagcggcccaaggtcaagctcctaaaattttgggttatattgatagggagggtcgtcctttagctgccattggcctcaccttactgtttggttgtcttgctttcgttgccgcctcgccgaaacagggtgaaatgtttgattggttgttggctttgagtggtttatcgtctatttttacctggggttcaatctgtttgtctcatatcagattcagagcttgtttaaaatcccttggtagaggtaccaatgaacttgtatttactgctcagggaggaattataggatcatggattgggttgatcatcaattgtctggtgttaatcgtttctttctgggttgcagcatttcctctgggtgacaagtcttccgccgaaggtttcttcaaggcttatctgaccgtcccagtcgtaataattgtatatgttattcacaagattgtcaaaaaaaattggtgcctgtatgtcaagttgaacgagatggatgttgattcaggaagaagagattttgacttggagcttttgaaacaagagattgttgaggaaaaggaaactttggccaggaaaccattttggtacagaacttacaagttctggtgttaa

SEQ ID NO: 3810 - DNA, 1362 bp, Artificial Sequence
  Optimized genes for Pichia pastoris
atgtcttttggaaaccactactactttccagtttccaccacctctttcccaaagtggattgaccgaatcatgacttccaacatcaatggatcccttcctcaatctgctaatgtagttgttattggatctggatttgctggaactgctgtttcttactatttgcagaatgaaattgctggtgatcaatccattgtcatgcttgaagctagagcagctgtctccggtgctacttctcgtaactctgggctgatcaagccagagtaccatagaaatcacggtgaatacgttgataagtttggttccaaggttgccggccagctagtgaactttgaagttgacaacatgaaggagctagcaagaattttgactttggacagtgatttgaatgagaaggctgatttccaagagcgtatccacttggatgcctactccaatccaagatcgtccgagaccgccatcaacgacttctacgctttcatggaaaatgaagaggtctctgtcgacttgaagagaaaagttcagatcttgttcggtgacttagccaagcaattgtcaaacgtccctactactcctttcgttatccattatcctaacggttccgtgaattcatacgactttgttactgccatgttgacccgcgccattcaaaagggattagcactctacactaatacactggttgaggaagtccaacaactggattctggtgtttggaaggtaagcacgtcgaggggagagctttttgccgacaaggtcgttttcaccacaaacgcgtatactcaaggattgttgccagaattctccaaatcaattatacccatcagaggtgtctcgagtcaggtcaacgttagaaacactggtaacgaacattcattgtctattggttctgatatatatgtgcctcagagcaagaacttgctttattcaagtttaggtgagttggagaaacagaccaacttcatggccaactacaacaccgtggatgactctactgtatcatcacaatctttggaatatttacaaaaaaatttgggtaaagtcaactccttggctacagcaacagctacctcatcttctagtggtattatggcttacacagatgatcacttcccgtatgttggtcaattatctgagttaggtaagttgaacgcatacattctggccggatgtaattgcagcggcctttccagaatgctgctctgtgctaaggaacttgccaaatctgttgctcttggcagtgagctgtctgacagagtcccagctccatacaaggtaacccgtgaacgtatgggtttggttgacaaattgatgcagagtgtgctgaacgagagagagattagagaaactagagctaggttgtaa

SEQ ID NO: 3811 - DNA, 1086 bp, Artificial Sequence
  Optimized genes for Pichia pastoris
atgcctgatcaattgtctttcttgaaaagaaagactggagtaattgttggtgatgacgtgaggaatcttttcctgcatgctcagaagaagggatttgccattcctgccatcaacgtcacttcatcatccactgctgtcgcagctttggaggcagccagagacaacaactcaccgatcatcttacaaacatctcaaggtggagcggcctattttgctggtaagggtgtcaagaactccaatcaagaagcttccattggtggtgctgttgctgctgctcactacattcgttccgtcgctcccttgtacggtatcccagtcattctccacaccgatcattgcgccaaaaagttgcttccatggtttgaaggattccttgcagctgacgaggcttactacaaggaacacggtgagccactattctccagtcatatgttggatctttcggaagagtcagatgatgagaacattgctacttgtgttaaatacttcaagagaatggccaagatgaaccaatggttggaaatggaaatcggtattacaggaggtgaagaagatggtgtgaacaatgaaaatgctgataaagaattattatacaccaagccagaaactgtgtttgcagtccacaaggctctggctccaatttctcctaacttctctatagccgcagctttcggtaacgttcatggcgtgtataaacccggcaatgttgtcctgagaccttcgctattaggggaccaccaaaagtatgctaaggagcaactgaaaagcgagtctgacaaaccattgtttttggttttccatggtggttctggctctactcaagaggagtttgatactggtatcagaaatggtgttgtaaaggttaatctggataccgactgtcagtatgcatatttgattggaattagagattacgttctcaagaaaaaagactacatcatgtctcaggttggaaaccctgaaggtgacgacaagccaaacaagaagtactttgacccaagagtctgggttcgtgagggagagaagaccatgagtgcccgtgttaccgaggccttgaacatcttccacacggccaaccagttgtaa

SEQ ID NO: 3812 - DNA, 1374 bp, Artificial Sequence
  Optimized genes for Pichia pastoris
atggttcaaccacaggagcctgagtttgaacaagcttacaatgaactgttaagcaccatccaagattccacgctatttgagaaaaaaccagagtacaagaaagtaatcgacgtcgtatccattcctgaaagggttgtgcagtttcgtgttgtctgggagaatgacaagggtgaattggaagtcaacagaggttacagagtccaattcaattcggctctgggtccttacaaaggtggcctccgtttccacccaactgttaacttgtcaattctgaaatttttgggttatgagcaaattttcaagaatgctttgaccggattgaacatcggtggtggtaagggaggtgccgatttcaacccaaagggtagatctgacaacgagatcagaagattctgttacgccttcatgtctgaactaagtcgacatattggtcaatttactgatgttccagctggtgacatcggagtaggcggaagggaagttggtttcctttttggtgcttataaaaagatcaagaactcttgggaaggtgttttgactggtaaaggccttacatggggtggatccttgattagaccagaagctactggatacggtttggtttactatgttgagaagatgattgaacatgctacccaaggtaaggaatctttcaagggaaagaaggtggccatttcagggtcgggtaacgttgcccaatatgcagcactcaaggtcattgagttgggaggaatagtcgtgtcactttccgactccaagggctctatcattgcccccaatggtatcacaacacagcagatctctgctatcgctgaagccaagttgaagttcaaatctcttgaggaaattaccggttcttactcagcattttctgattctcctgtgaaatacattccaggtgccagaccttgggttcacgtcggtgatattgacgtagcacttccatctgccacccagaatgagattagtggagaggaggctaaggctttggtggctgccgggtgcaagtacgttgctgagggttccaacatgggtagcactttggaggcaattgatgtcttcgaaggtgagagagcctcatcatctggaactgccgtttggtacgctcccggcaaggccgccaactgtggtggtgtcgctgtttctggtctggaaatgggacagaactcccaacgtgtgcaatggactgaagaagaggttgaccagaagctgaaagatatcatgatcaactgttttgacaattgtttaaacactgctatagcatattccagtgagaccaacaaggatagtttaccgtccttagtcaaaggagctaacattgcgggatttgtcaaggttgctgatgctatgtatgctcaaggagacgttttctaa

SEQ ID NO: 3813 - DNA, 1227 bp, Artificial Sequence
  Optimized genes for Pichia pastoris
atgactgagtctgctttcagtatatctcatctgcatgtcatcactccaactttcatgcacgttttgaaatacaagtacccagaatattctacaccaaagtcctccttcttgttgtttttccaatcattactttatattgaatccatggtttctaaaaccgctcaaattttggctggtgccgctgtcgttggtaccggcttaattctttaccagcagaagaaacaagagaaattgcaaacacctatctcctctggaagatctggtaacaaccccgtcacggtgggaagtggtatcgctcctgccgttgataaccacaccagatggtctcagtctccagagtcgaagtttatctcaacaaagtctttggggggaccacctgctaaacaggacgcttacaatgatgctagataccaatttgaacaggcacaacagaagttcgaggacaccaaggcttcatggtggcaatggggacagcaaaagtctgatgaagtctctcgtgaatctgaaaagcaatatgagattgctaaggccaaattagaagatgcaactcaatctcttcgtgagcaaggtcaagacgcactggacactgctgactctcaataccaaacttggaagtcacagtggcaaagcaagttgaacgatgccaaggagaagaccgacgatctcgtatcccaggccaaggaacaaaccaaatcattttccagtgaagcccgttccaagcttgacaaattcagacaggagtttaacagtaaaaaagaagagctgaggaagaagtatgctcatttgagcgaggaagaactcgatggcaaagcctttgagtccttgagaggttggggtgaatcagctgaggcatttgccagagaggagtacttggagtcaaagagaaatgctgctgaaacacgatcgaccctacagcgtggttacgacctgtcccaacaaaagctgaaggaagcccaagatgagttcaacagaactaagaaggcttggttctcttggggtaaggatcagaatgaagaggcccacaatcttgcctccagaaagctagcagaggctcagaaatctttcgatgatgcttctaagcaattggaccaattcacttcatctgttgctaagtcggcaaaggacaactccgactttgttgtccaaaagactaaagaaggtttggatgttgccaatgacaaggcgcaggatggattaagtagcgtgtccaactggattagaaaataa

SEQ ID NO: 3814 - DNA, 1131 bp, Artificial Sequence
  Optimized genes for Pichia pastoris
atgtatattccccctacgtctttcaacagaaagcaattcaagtattctggtgacaattacaacacccccagcgagttcaaagaacaagctcgcctagatatccatcgtaaactagctcaagcccaatctaacttgagacatggatcttctccattggcaacaaaatcaataactgcctcttcgagtcagttctctggatcagatgttgagagtttggcttctgttgcatcggatggttccgaaatgactattgatgaatccaaaaggaaacgtaaggcctaccttggcttcttgaagaagcctgagtccaagttgtccagaactaccaccagaagatctagccttttttccaacaacctgacccaacagcctaccaaccaaactgaggctacatcattgttcactaactacttctccgataacggtttcgttaccgaagttgaccttaatgaagtcttaccaaagaattttgacgatatgtacgaccctgatttgactgtcgagagattctacaatggaagaccagtgttcaccaaaagaaacttagtcaactgggaattgaatgatctgcgttcccttttgattgtttctgaactgaagccagaatggggtggttacattcctagaatcagagacaacccagatttccacatcgtgctactgccgctgacatccagtgacaacgagtttatcgagattctgatgagaagcgatatttataaggagtctaagttttcaaaggaatttaagatgaagactgctgcttacatcgtccagagtgccagatacagacacaatttggccattcaagctcgttattcagacatgccaaccaaggatccaactttgcaatacttttcgaaggtagaatggagaaatattattgagaactatttactcaatttgggtgttgaaactcagtgcagattggactttcaacatagatgttccatcctcaagggtcaccctgcacaaaagaacgacttgctttctaaagctattttgaacaatacacagaaacaatttaatggtaacgggttatcaaaagaggagaaggctcgaatctggtctcaggcccagtctgagatctacaagcgtttaggacttgactggactccagacaagatttaa

SEQ ID NO: 3815 - DNA, 573 bp, Artificial Sequence
  Optimized genes for Pichia pastoris
atgtgggttttgaactggttccaagatgttcttgcttctctggggttgtggaacaaacatgctaagttgctttttttgggattggacaacgctggtaagactacgctattgcacatgttgaagaacgatcgtttagcaacccttcagcctacttggcacccaactagcgaagagttaagtattggtaatgtgcgtttcactacctttgacttgggtggacacgagcaggccagaagagtttggaaggactacttcccagaagttgatggtatcgtctatctggttgacattgctgatccagagagatttgaggagtctcgtgtcgaacttgatgccctgctaaagatcgaagaactgtccaaggtacccgtactggtgcttggaaacaagattgacaagtcaacagctgtctccgagaatgaactcaggcatgccttaggattgatgaccactacaggcaaagacaaagttcaattggttgagggtcaaagacctttggaggtcttcacctgttcgatatatttgagacagggttacggtgaaggtattagatggttatctcaatacatctaa

SEQ ID NO: 3816 - DNA, 654 bp, Artificial Sequence
  Optimized genes for Pichia pastoris
atgtccaagatttctaccacccaagtcagagaacatgtcaaggagttgttgactttctccaatgaaaccaagaagagaaactttttggaaactgttgagcttcaggtcggtttgaaaaactacgaccctcaaagagacaagcgtttcagtggaagtctgagattgccacaagttcctcgtccaaacatgaacttgtgtatttttggtgatgcttttgatgttgacagagctaagtcattaggtattgatgccatgtctgttgatgatctcaaaaagttgaacaagaataagaaactgatcaaaaaattggccaagaagtacaactctttcattgcttctgacgttttgataaaacaggttccaagactgcttggcccccagctgtcaaaggctggtaagttcccaactccagtgtctcacaatgatgacttatatagcaaagttacagacgtcaaatccactatcaagtttcaattgaagaaggttctttgcttagcagtagccgttggtaacgttgaaatggaggaggatgtgctagtgaatcaaatcatgatggctgtcaacttcttggtatcgctactgaaaaagaactggcaaaatgtcggatctttagtcattaagtcttccatgggaccttcatataggctttactaa

SEQ ID NO: 3817 - DNA, 1281 bp, Artificial Sequence
  Optimized genes for Pichia pastoris
atgttggcttccggtaagcgtttcttttcctcatcaagtttgagacaagtctctgcttgggcaaaagtcgagaaggccccagctgacaagattttgggtttaaccgtcttgtacaaccaggatacaaatccttctaagatcaacttgggagttggtgcttacagagacgaaaacggtaaaccatggattctcccttccgtgcgaaaagcagaagaagtattgatcaaaacagaagttaacaaagaatatgttccaattactggttctcctaagttcaatgaattaatcaagcagactctttacggtaacgatcctgccggaaagcaattattggaacagaacagaatcgtcagctcccagtccatttctggaaccggagcattgaaagttttatctgagttcattaagtatttccatgaaggtccaaaggatgtccttgtgccgaatcctacctgggccaaccacattgccattcttgagagaagtggcttgaccacttcgaaataccgttactacgactttaacactaaccaattggataaaaagggtttgttggaggatttagagaatgctgctgagggtcaaccagtactgctacatgcttgttgccacaatcccacaggtgttgatccaacccttgaagagtttgacgagatcattgatgttctcagtcgtaagaagcttcttcctgttgtcgacatggcttatcaaggtttcagatctgggaatccaatcgacgatttgagtcttttgtttagattcaacaaggctgttgtggacggtagattggacaactttgttttatcgcagtcgtttgctaagaacatgggactctatggtgaaagggtcggctcactatcactgatcacttccgatgctgatgagtccgtcagagtcaagtctcaactggaaaaggtaataaggcctatttactcttccccaccatctcacggttccaagttggttgagattgttcttagcgatgaagccatctaccaacaatggttgaaggacgtcaaagtgatgtctgacagactggtgtcaatgagaaaactactgtatgatacgctaaagaataagtacaataaccccctggactggtctcatctgttgcaacagaagggaatgttctgttacactggattgaacccagaacaagttgccaagctgattgagcgttctgtttacttgacttctgatggaagaatttcaattgctggtatctatgagcaaaacgttgactacttagccaatgcaatccacgaggttactaccaactaa

SEQ ID NO: 3818 - DNA, 732 bp, Artificial Sequence
  Optimized genes for Pichia pastoris
atgtcactacccagtgccacagccaacgctgctgttaccaaccaactgctcgaacttcctgataccaatttagttgctcctgctgtcactgaagtttctgagaaagctgcccaatggccagccaatgtcaggttacagcgacagaagaagattttgtaccaacgtttgaaggttcctcctgccatagcccagtttacaaatactttggacagaaacactgctgctcagactttcaagttgttcaacaaatacagaccagaaacgtatgagcaaaagcaagagagattaaccagagaagctgcagccattgctgatggcaaaaagaaggaggacgtgtcgtccaagccatatgttgtaaaatttggtttgaaccacgttgtcgcacttattgaaaataaaaaaccaaagctggtactgatcgctcatgacgttgacccaattgagctagtggtgtttttgccggcactctgtcgtaagatgggtgttccatacgctattgtcaagggtaaggctagattgggaactcttatccacagatctaccgctaccgtcgcagcattggttgatgttaagcctgaagatgaggctgaattggctcaattggtctctgctatcaacaagaacttcactgagaagtacgaggagtccagaaagaaatggggtggtggaattctttcagctgagtctcaagctaaagccgccgctaaggccaagatcctggaagaaaaataa

SEQ ID NO: 3819 - DNA, 1044 bp, Artificial Sequence
  Optimized genes for Pichia pastoris
atgtccgaagaagagcagcaacaaactaatgaaaaggtcatcgatttggagaagagaatgttcgttggtaacatcgactatgacactaccgaggaagagttgcgtgagttaatcaccggtttcgatatcgaaggaattgagattccaaagcgtttctccagacgtgtcggcaaactgactggaagaggttttgcatttgtgaccttcgcatcaagtgaagagactgccaaggctatcactgaatttgaaggtaagaatttgaaaggtagagacatttactgtaagtctgccaaattgaagtccactgaggagaaaaccaagaagaagaaggccaacaagaaaaagactagtgctgctaagaacaacgacggaactacagaaggtgtcaccaacactgctgttgatgggacagaggaatctcaagctgatgtttccagcaatgcagattctgcttccgattcagttgccgactccaaggacaaggagaacagtgcgcccaacggtggtaagaagaagaagccttactctaagaaaaaacagaacccacacaaggttccattggaacaaggtaccccttctgaaacgtcaattttcattagaaacttgcaccaagaagttgtcacatccgagcttacagagtttttatcggaatacgacccacaatgggttagcatcccgagaagaaatatcccaagacatgttgttcagaagctgagaaaggaaaacattcctataaggtctcgtggtatggctttcgtacgatttgccgatcatgaaacacagcagagagctcttaaagaactcaatggtaaagagatcaagggaaaacccatatccattgatattgccattgactctttcgtgaaggaggagcctaaggaatcgtcagtcaaggatggagctgacgtgtctattgtaactgacggtgctcaacctcaagatgagggagaagaaggcaaagttgaggaggaagtcaaatctgagccactaaaaccactggagtctaccaccattgctccagaggttcaaaccactactgtctaa

SEQ ID NO: 3820 - DNA, 1680 bp, Artificial Sequence
  Optimized genes for Pichia pastoris
atgcaattgcgacactccgtgggtcttgccattttgtccgctatagcggtccaaggactactgatcccaaacatcgagtcattaccatctcaattcggtgccaatggcgattccgagcagggtgtattagcccatcacggtaagcatccaaaggttgacatggctcatcatggaaaacatcctaagattgctaaggattcaaaaggtcatcccaaactttgcccagaggctttgaaaaagatgaaggaaggacacccttctgctcctgttatcaccactcactctgcctccaagaatttgattccatactcttacatcattgttttcaagaaaggggtcacatctgaggatattgacttccatcgtgaccttatatcaacattacatgaagaatcggtatccaaactgagagagtctgatcctaaccactccttctttgtttctaatgagaacggagaaaccggttacactggagacttttccgttggtgatttgttgaagggatatacaggatactttaccgacgacacattggaactcatctcgaagcacccagctgtcgctttcattgagagagactctcgtgtgttcgctactgattttgagactcagaatggagctccatggggtttggccagagtctcccacagaaagccattgtctttaggctcattcaacaagtatttgtacgatggtgctggaggtgagggtgtcacttcatacgttattgatactggtatccacgttacccacaaggagttccaaggtagagcctcttggggaaagactattcctgctggtgacgttgatgatgacggtaatggtcacggaactcattgtgctggtactatcgcttctgaatcttatggtgttgccaagaaggccaacgttgttgctatcaaggtcctgaggtccaacgggagcggctcaatgtccgacgtgctgaagggcgttgagtacgccacccaatctcacttggatgcagtcaagaagggtaacaaaaaatttaagggttctactgctaacatgtctcttggtggtggcaaaagtcccgcattggacttggccgtcaacgccgccgttaagaacggtattcattttgcagtagcagcaggaaacgagaatcaagatgcttgtaacacctcgccggctgctgctgaaaacgctattaccgtgggagcatcgacgctcagtgatgctagagcttatttttcaaactacggtaagtgtgtcgacatttttgccccaggtctgaacattctttcaacttacaccggatctgacgatgccacagcaacgctgtctggtacctccatggcctctcctcatattgccgggctcttgacctatttcttatctttgcaaccagccgctggttccctgtattccaatggtggtagtgaaggtgttactccagctcaactaaagaagaacttactaaaatacgctagcgttggagtactggaagatgttcctgaggacacccctaatcttttggtctacaacggtggaggacagaaccttagcagtttctggggtaaagaaactgaagacaacgtggcaagtagcgatgacactggtgaattccactctttcgtcaataagttggagagtgctgttgaaaatctagctcaggagtttgctcactcagtgaaagagttggcatccgaattgatctaa

SEQ ID NO: 3821 - DNA, 825 bp, Artificial Sequence
  Optimized genes for Pichia pastoris
atgtcttctgagtctcgtacttactctttcaagatcttcagtattttgacctacgctttgtccatttacggtgaggtcagatattttcttttcagaactcatcactccaggtcgtacctgactccattcactggaaattcgacgttggattacatttatgtcattgctactctcctattacaattgctgtttgtcgttcaatacttctctcaggatggtactgtttccgccagagagcagaagaacgttttggaacaggttggttaccacttttctatctacaacgtgttgaacttcatctgggtttatttgtttaaacacaagagattcttgttcgctgaaattgttctgttcgtcaacttattcaacttgttatccctgtactttattcataaaacatatgctatcaaggacttgggtagatggttcaccatccacttgagtactgtcgccttgccattgtcttggatccaatatgccattttttggaacggtgccgcattatttcattcccattatgtgtcactgcttccaagattgcttgcaaatttgctaatttgggaattccttttggtccctgctttctttatcgtggtatttgctgactacggcgtgggattctccagctcataccttaccttgtcaattgcagtaggtcaactgttaaccaaagttattggtttgcaatggattttcgggtttgttatcgctggaacaatatttctcctttcactattggtttctaccggtgtcttggctggtaaggttgccaataacaacaatgttcttggaagtgaccgtgagcaagctcctctactgacataa

SEQ ID NO: 3822 - DNA, 249 bp, Artificial Sequence
  Optimized genes for Pichia pastoris
atggttttggttcaagatctattgaaccctaatcctgtttccgaggccaagcaacacaagttgaagactcttgtacaagctccaagatcttttttcatggacgtgaaatgcccaggttgctttgaaattacaacagttttcagtcatgcccagaccgcagtcacttgtgattcttgtaccaccgtcttatgtactccaactggtggtaaggctcgtctgtcagagggatgtgctttcagaagaaaataa

SEQ ID NO: 3823 - DNA, 363 bp, Artificial Sequence
  Optimized genes for Pichia pastoris
atggctggattgaacgccaaagagcttagagctaaatctgagcaagagttggaggctgaacttattgaacaaaagaaaaaactggctcaattgaaggttcagaaattaaccaaggcctcagttcctgagatcaaggcagtcagaaaggacattgccagagttttgactgtcatcaacttgcagaagagagatgctgtacgtgaatcttacgccggtaaggaacacattccaaagcagctgagagaaaagaagactcgtgcattaagaagagccctcaccgctgaggagaagtcccatgaaacagtgagacaaagaaataggcgtgttgctttcccaagacgactatatgctgtcaaggcttaa

SEQ ID NO: 3824 - DNA, 1059 bp, Artificial Sequence
  Optimized genes for Pichia pastoris
atggacattgacttggatattcagatgaaggatgctgttgagcctgatttggaggatcagcaatcttccagttcatctgagtcctttgacttcccaattaacaacgttaattactcatccaaaccagttgaacttacgagctccaatatcaaccaattagactcatggattgagcaactgactgactgtaagccccttagtgaagagtctgtcaagaagctgtgctccatggccatcgacgttttgaaatttgaagaaaatgttcaaccagtcaacgtcccggtcaccatttgtggagatgttcacggtcaatttcatgacttgatggaattgttcaagatcggaggcccttgcccagacaccaactacctgttcatgggtgattatgtcgaccgtggttactactcggtggagacagtgagctatttagttgctatgaaaattcgatatccaaagaggataaccatcttgcgtggaaaccacgagtcacgtcaaattacccaagtttatggtttctacgatgaatgtttcagaaagtatggctctgctactgtttggaagttattcactgatctttttgattacttccccatcaccgcactcgtagacaacaagattttctgtttgcatggtggtctaagtccaatgattgaaactattgatcaagtcagagagcttaaacgtgtacaggaggttcctcatgaaggtcctatgtgtgatctgttgtggtctgacccagatgacagaggtggatggggtatttctccaagaggtgccggatttactttcgggcaggacatctctgaacagtttaatcacaccaatgatttagatctaattgccagagctcaccaattggtgatggagggatactcttggtcccatcaagatctggttgtcactatcttttcggcacctaactattgttacagatgtggtaaccaggctgctatcatggaagttgatgagagacacaacagagaattcttgcaatacgacccttctatcagaccaggtgagccaactgtcacaaggaaaacacctgactactttttgtaa

SEQ ID NO: 3825 - DNA, 255 bp, Artificial Sequence
  Optimized genes for Pichia pastoris
atgtttcaaagaactacagcaactttggttaggcagaacaaggccattgccagattctactctgaaggttctaccggtgctccaagatccgatggttcaggagatgctttcaccaagagagagaaggctcaagaagacttttatatcaagaagcatcaagctgaacagctggccaaacttcgtgagcaattgaagaaccaaaaggagcacttgcagaatttagagaaagagatcaacaatattaaggaaaaataa

SEQ ID NO: 3826 - DNA, 1062 bp, Artificial Sequence
  Optimized genes for Pichia pastoris
atgtcaacatttgatttcttgagtcgaaaaagcggcgtgattgttggtgatgacgttcgtaaactttttgagtatgcccgtgagagaaagtttgcaatcccatctataaatgtaacatcttcttcgactgctgtcgctgttttggaggctgcaagggataataaatctccaggtaagggagtcaacaacaaggacctgtctgcttccgttaccggttccattgccgcagcgttgttaatcagaactatcgctccttcgtacggtattccagtcattttacacaccgaccactgtcagaagaaatggttgccatggtttgacggtatgttggatgctgacgaggaatactttaagacccacggtgagcctcttttctcaagtcacatgctggacttgtccgaggagactgatgatgagaacatcgccatctgtgtcaagtatttcaagagaatgaccaagatgaaccaatggttagagatggagatcggtatcactggtggagaagaagatggtgtcaataatgaaaatgctgataaagattccctctatacgagtccagaaactgtttttgccgtccacaaggctctagcaccgatctccccaaactttgctattgctgccgccttcggtaacgttcatggagtatacaagccaggaaacgtggaattgagaccttcaattcttggagagcatcaagcttacgctgctcagcaattgggtttgaagaatggatctaaacctctgttcctagtgttccatggtggttcagggtcatctcaacaggaattcaacaccgccattaaccatggcgtggttaaggttaacttggacaccgattgccaatacgcctacacaattggttctagagactacattctgaagaacaaagactatttgcagtccatggttggaaatcctcaaggtgccgacaagcccaacaagaagtacttcgacccaagagtttggattagagaatctgagaagactatgtctggacgtgtcaaagaagctcttgaagttttccacgcagctggtactttcaaaagcgaatccaagttgtaa

SEQ ID NO: 3827 - DNA, 777 bp, Artificial Sequence
  Optimized genes for Pichia pastoris
atgtctacccaccaagacattgagtcgagcgcagaaactgctcacaatcctcatgacgagatccacaagggtgaatttgttacgacccaacaagattatttggctcctttcaccggtggactcatatcaggttaccaggtcagaccatctcgtaaatttgccaacccagtcccagcaggtgtcttttcattaggaacttcactgtttactttgggtttgatcctcgcagggacaaggaatgtttcatcccctgctgttcttactggttctttccttttctcttctggtcttattcaaatcatttgtggtatctggtctatcgtcttggaaaatgtcttcggttccgtacttctactgtgttacggtggtttctttgctagttttggagccattcagaacggtatgggtgtggacgcttacactgatgctgatgagttgactaatgctttgggactgtatgttgctgcttggactgtgtttgcaattgttttgtggaccgccactttcaagtccacactgcccttattcttgttgaccttcttcactgccatgtttttcttactatatgatattgctatctttggcaaccatacaggatgtgagaccgcttccggtgttttctgctttttggccgctatgtgtgctttctacgccggctacgttggaatgaccaagaaccaaagaaactcttacattccagttccaaagactaaatggttattgatgccatccagtgccagatctcctgactacaaccaggccggattctatgtgtaa

SEQ ID NO: 3828 - DNA, 534 bp, Artificial Sequence
  Optimized genes for Pichia pastoris
atgggacgtagaaagtcgcaggcagctgctgagagaaacttggagccaattaagattagcaccgattccatcaagaagagaccaagaagagacagtaatgaacctccattcaagaagttcgatgatctagaaatgtttgagacatatttgaagggtgaatcttgggataatgatttcgactttctgcatgcccgcttagactactaccctccgttcattaggaatgagatccacgacgatccagagaagatcaaaccaactatgaacaacaagtctaaaaagtttgtgcgtaaccttcatcatcacgttgacaagcacttgctgaagcaaatcaacgatatggttggtattgagtataaattcaaacgtgaagaagagaaacttcctgatggtagattgatttggagatacaaggatgaatcagaccacggatttgaaggtttggacagaaaatggactgttgaggtcgatgttgaatgttctcctaacgaccccaccgtcgtcgtagacatgagatccattccaatagactaa

SEQ ID NO: 3829 - DNA, 837 bp, Artificial Sequence
  Optimized genes for Pichia pastoris
atgaccgacagagctactcaaaattcgatcaacactaaccagaattcaaatagttcgttcaaccaagacgttgaaaaaggtgacgtcgaggctcaaggtgctcctgcacagccaactttcaccaactccaccttcagacatgatgaccagaacatttacatcaatgatactgccattccaaaggaagagtttatgtacgcctttggtggaacgttaaccactggtcgtcaatctgtccacagatcattcggtaacccagttccagctggattggccggtttctctctgggaacttttgctcttggtttgatcctattgcaagctaggggagtcacagatgtttccattcttataggaatgtttttgtttgtttctggtgtagtcgagatcattgctggtatctggtgtatcgtcgttgagaacacctgggcttctgtggtgttcttgggctatggttctttctggttgggatatgctgctattgtcactcccgcgtttggagttgccgcagcctatgaaactgctgaagattttaacaatgctgttggtatgtacttgtgtccatgggccgtgttttcttttattttgtggtcttgtacttggaagagcacatggccattgaccgccctcgttttctgcattttcatgatttttttagttctaactattggttacttcgtaagttcagttcctacaatcaaggctggtggtgtcttctgttttgtcgggtccttacttggattctacaacatgtatgcaggcctggcaaaccctaccaattcctacgttgtggttcaccctctgttcatgccaaacgctgccaaacctgcctcctaa

SEQ ID NO: 3830 - DNA, 1197 bp, Artificial Sequence
  Optimized genes for Pichia pastoris
atgagtgtacgtaatgctactttcagattgtccagagcggccatagccaagagaactttggttagaattgcatctcaggcctcgttgagaccgaccaccctaaactccgccactggagttgctagaagtcagctcacatttagccgaggggtaaaaaccatcaattttggtggcgtggaagaagttgttcatgagcgttctgactggccaagagaaaaacttttggagtacttcaagaatgacactcttgcattgatcggctatggttcccaaggttacggacaaggcctaaacttaagagacaatggattgaacgttattattggtgtccgtaagaacggtgcttcttggaaagctgctattgaggatggatgggttccaggtgaaaatctgtttgatgttactgaagccatcaagaagggttctatcatcatgaacttgttatcagacgctgctcaatctgaaacatggtctactgttaagccattactgactgagggaaagaccctgtatttctcccacggtttctctccagtgttttcaaatttaacacacgttgaacctccttccaacattgacgtcattcttgccgctcctaaaggtagtggtagaaccgtgaggtcactatttaaggaaggtcgtggtatcaactcgagctatgctgtttggaacgatgtcaccggaaaagcagaagagaaagccattgctttggctgtcgcagtgggatccgggtatgtttatcagacaacgtttgaacgtgaagtcaactctgatttgtacggtgagagaggatgcttgatgggtggtattcatggaatgttcttggcccaatacgaggtactcagggagaatggtcacactccttcagaagctttcaacgagaccgttgaggaggctacccagtccttgtatcccttagttggtaagtacggtatggactacatgtacgatgcttgttctaccactgcacgccgtggagctctggattggtaccctatcttcaaggatgccctgaaaccagtcttcgaagacctttacaactcagtcaagactggtaaagaaactcaaagatctttggacttcaattctcaaccagattacagagagaagttggaaaaggaacttgagatcattagaaacatggagatttggaaggtcggtaaggaggtcagaaagctgagaccagagaacaactaa

SEQ ID NO: 3831 - DNA, 681 bp, Artificial Sequence
  Optimized genes for Pichia pastoris
atgtccattccaaagcctgaaggttctactttgagattgggatcaactgctccagatttcaaggctgagacttctcgtggtcctatttctttccacgacttcattggtgactcctgggttgtcctgttttctcaccctgatgatttcacccctgtttgtactacggagttgggtgcctttgccaaacttcagccagaatttgaaaagagaggtgtcaagctgatcggtctctcggccaatacaaccgattctcatcaagcttggatcaaggacattgacgaggttactggatcccacttgactttcccaattattgcagacccagagagaaagattgctttggcttatgatatgattgattttcaagatgcttcaaacgttgatgacaagggtgttcaatttaccatcagaagtgtgtttatcatcgaccctaagaagaaagtacgactgattttatcatacccagcttccactggtcgtaacaccgcagaagttttgagggtgatagactctttgcaaacaggagacagaaacagagtcaccaccccaatcaactgggtacccggcgacgatgttattgtccatccaagcgtcactaatgaagaggccaagtcccttttccctcagttcagagttatcaaaccatacctacgtcttacaccgttagatcccagtaaataa

SEQ ID NO: 3832 - DNA, 678 bp, Artificial Sequence
  Optimized genes for Pichia pastoris
atgggtgacacattaaaagagccaatcatttttgctccaaagacttaccagtatgacaagtttcaattgaacccagaggacatggctgaagatccaattgagcagtttaccaagtggttccaagaagctcaagaggctagagaggatcttcctgaagcagtcaatcttgccactgcccgcctaccgtctggccgtgtgagttcgcgtgttgtcctgttcaaggaattggatgaccgtggattcgtcatctacagtaactgggaacaatccaagaagggacaggatgtgaaatctaacaagtatgctgccatcaccttcttctggaagggtttgcagagacaggttagagtcgaaggtgtttttgaagccgtttccaggagcacggtacaaagatacttcgacactcgtccaagaggttcaaggttgggtgcatgggcatctcctcaatctgttgagattccatccagagctgctttggagtccaacctggaggccatagaatctcaattcagagattcagtttctgtgccagttcctgatcattggggtggtcaacgtctcgtacccttagagatcgagttttggcaaggaagaccttcacgattgcacgacagactggtttacagaagagaaaatttggaagacaacaaatggtctattgtcagaattgctccttaa

SEQ ID NO: 3833 - DNA, 1410 bp, Artificial Sequence
  Optimized genes for Pichia pastoris
atgtctgccataaggtccattgctcaaagaaccttgagaactcaggcacagatctcccgtgtttcatttttgggagccagagcctactctaccaaggaaccaaccttgaaggagagattcgctgaacttcttccagagaagatcgagcaaatcaagcagttgaaagccgaacatggaaagaccgtcattggtgaggtacttctggaacaagcttatggaggtatgagaggtatcaaaggactggtctgggaaggttctgtccttgatccaattgaaggaatcagatttcgaggtcgtacaattccagatattcagaaagaactgccgaaggctcctggtggtaacgagccattacctgaagctttattctggttattgctgactggtgaagttcctaccgaatctcaaactaaggctttctctgaagaactcgcggcaagatctgcattgccaaagcacgttgaagagctgatcgatcgttctcctgctactttgcacccaatggctcagttttcaatagcagtcactgctctagagtctgagagccaatttgccaaagcttacgccaagggtgtcaacaagaaggaatactgggtttacacctatgaagattcaattgatttgatcgctaagttgcctaacatcgcagctagaatttacaagaacgtcttcaaggatggtaaagtcggttccgttgacccatctaaggactactcagccaaccttgcatcgctactgggatttggagagaatgctgagtttgtggaattgatgcgtctatacttgtctattcattccgaccacgagggtggaaatgtttctgctcacaccactcatttggttggtagtgccttaagctcgcctttcttgagttttgctgctggattgaacggtcttgctggtcctttgcatggccgcgccaatcaagaggtcttggaatggttgttccaaattaagaaagagcttggcggtgacttttccaaggagaagattgagaaatatttgtgggatacattaaaagcaggcagggttgttccaggttacggtcacgctgtgcttagaaagacagaccccagatacactgcccagagagagttcgccctgaagcatctgcctgatttcgacttgttcaaactcgtctcagctgtttatgaggttgctccagttgtgctaacggagcacggtaagactaaaaacccatggccaaatgtagactctcactccggtgttctgttgcaatattatggtttgactgaggaaagtttctacacagtattgtttggtgtttccagagctcttggcgtgttaccccaattgattattgaccgtggggtgggggcccccatcgaaagacctaagtctttctccactgaaaagtacattgagttggtcaagggattaggaaaataa

SEQ ID NO: 3834 - DNA, 1020 bp, Artificial Sequence
  Optimized genes for Pichia pastoris
atgtctaccagacctcaggttacggtcatctcagtagaaggtaagccatcttccacttcgctaccgcttcctgcagtgttcaaggctcctattagaggtgatattgttcaatctgttttcacccgtatcaacaagaacaaacgtcaagcctatgctgtctccgagaaagccggtcaccaaacctctgctgaatcttggggtacaggccgtgctgttgctcgaattccaagagtcggaggaggtggaacccacagatctggtcaaggtgccttcggtaacatgtgtcgtggtggtagaatgtttgcacctaccaagatttggagaaaatggcatgttagggttaacttgaatgaaaagagatacgctacagccagcgccattgcagctacttccgtacagtcattagtactagctagggggcatagaattgaacaaattgctgagatcccattggttgtttccaacgatttggaggctattcagaagactaaagatgctattgccgccctcaaagctttgggtgcgtccgatgacttgatcagagttatcaagtccaagaagctgagagctggtaagggaaagtacagaaacagaagattcactcagcgtcgtggccctcttattgtcttcaacgaggacaagggtttagtcaaggcattaagaaatatccccggcgtggaaacttgcaacgtcagaactctgggacttttgcaattggctccaggtgctcatctcggaagatttgtgatctggactgaatcggcctttgctgccttagacagtgtttatggttctgagaccactgagtctgtcaaaagtaattactctcttccaaagaatattatcaccaatacagacattagtagcgtgatcaattcagcagaggtccaagctgctataaggccatcactggcaggaaaaccaactcacttgcacgttaagaaggtcaaccctctgaaaaaccatgaagttatgttgaagttgaacccatacgccaaggttttggccgagaagaaataa

SEQ ID NO: 3835 - DNA, 1743 bp, Artificial Sequence
  Optimized genes for Pichia pastoris
atggcttttggtgataagttgacccatagattccataaatcctccgacgcttctaccggtgcagcatctgttgaagagtactctacatctatccacgaaaagtctgacaaaagtgctattggtaagttcttggacaagattgctgttcaggaggaaaaaggtttgtctgtctcccagactttcctattcaattttgacctgagacctgtggagtctgccagaagggtctggtcttggttcaactacgtatttttctggattgccgattcctttaacatcaatacatggcaaattgctgccactggcgtccaagctggtatgtcatggtggacttgttggcttagtgtgtgggttggatacttcttgtgcggaattttcgtaactatctccgctcgtgttggcatttactaccacgtttctttccctgtcagctgccgttcgtcgtttggggtgttcggatctatttggccagttttcaacagagttgtgatgtcttgtgtttggtacggtgttcaaggctatattggcggaaccaccatggccttgatgttgaggtcaatttttggaaacgatttgaacaccagaattcctgatggtatttcttctcccaatgtcactacatttgaatttttatcattttttctgttttggctcttctccctaccattcatctggttggagccacacaaggtcagacacctgttcactgttaaatcttacgtcgttcctgctaatggtatcggaccgatagtgaaacagccatctacaattcatggttctgagtttgcttgggagttcattagaatggttatgaactctcttgcaaactttgcaactttgattaccaacgctccagacttctcacgattttccaagaccaagaaaagcgccaaatgggctcaattgttttccatccccctgtgtttcagtatcacttctttgatcggtatacttgtatcgtcagcttccaccgttatttatggtgaaacttattggtcacctattgatgttcttgggcgtttcttagacaattacaactccggtaaccgtgccggtgtcttctttatttcattagcatttgcgttggcccagttgggtaccaatatctctgccaatagtctaagcgccggaacagatgctactgctttgttcccaaagtacattaccatcagaagaggtggttacatctgtgctgctgtcggtcttgccatctgcccatgggaactgttatcctcttccaacaagtttacgacatatttgagcgcttactcagtgtttcttagtgcaatcttcggtgttatctttgctgactactatatagtcaagagaggatggttaattttgactgacttgtacaatgctgagaagacttccgcctacacttactggcacggtattaactatagagctttcgtcgcatacatttgtggtatcttgccaaacattgttggtttcgttggtgctacgggagctggaagtgtacctcaaggtgccatgtacgtttatgatttcaacttcttcaccggatttgcctcgtccattgtcgtctatgttctgctctgttacatccatccaattccaggtctgccaactgatatcaagaaggatcttttcaagaagggctggtacgagatctatgctgaagttgaggaattcgatgtgtctggtggagtcatcaacggagaaggtcaagagcctgaagaagaagccattgactattattcagaggagaaaaaggtttaa

SEQ ID NO: 3836 - DNA, 2712 bp, Artificial Sequence
  Optimized genes for Pichia pastoris
atggaggagacccaattcactgacagagccttggcaatcattactaacgctactaaacttgccaaggacaactctcatccacaggttcaaccaattcacttgcttgccgctatggctccgaccgatgaagacactactccttacttaaaggtgttggttgagaagggtagatttgactggcaaactttcgaaagaaatattaacagagctttgattagagttccctcccaaacaccagctcctaccgacgtttctttctctggagtcgcagctcacgttattcaggaggctggtaagatgagacaacaacagaaagacagttatattggacaagatcatttgctgttggcgctcttagaagataagtctatcactcaaattttgaaagatagcagtatctctcctgatgcactgaagacacagatcatcaacctgagaggtaaccagagaattgattcacgtcaagctgattcttcctccaaccatgaattcttggacaagtatgccattgatttgactgagcaggctagagaaggtaagattgacccagtcatagggcgtgaggaagagattcgaagaactatacgagtattagctcgtcgtacgaaatcaaacccatgtttgatcggtgatcctggtgttggaaagacctctattgtagaggccgttgctcagaggattattgacaatgatgtgcccaacattcttcagaactccaagttgtatgctttggatctgggtgccctcaaggcaggtgctaagtaccaaggtgagtttgaagagagaatcaaaggtgtattgaatgaaattgccgagtctaagcaaatgataattctgttcattgatgagatccacatgttgatgggtgacggtaaatctgatgctgctaacttgttgaagccaatgcttgcacgtggttcattgcactgtattggtgcaacaaccgtcattgaatacagaaaatatgttgagactgatggagcttttgagcgtagattccaacgtatcgatgtcagggaaccaactattcgagaaacagtggctattttacgggggttgcagccaaagtacgaaattcatcacggtgtcagaattttggatagtgctttagtgacggctgcccaacttgcttctcgttacttgacatatagaaagcttcccgactctgctgttgatcttatcgacgagtcatccgcttccgttgctgtcgcaagagactccaagcctgaagaacttgacaccaaggaacgtgaactacagttgctagaagttgaaatgaaggctctggagagagatgccgactctgacaaaaccactgaagaaagactgactgccgtaaagcagaaggtccaagaattggaggaggagctagttcctctaagagctaaatacgagcaagagagggctggacatgaggaattaaccgctgccaagaagaaattagacgaactggaaatcaaggctacagatgctgagagaagacacgataatgcaacagcagctgacttgagatactttgccattccagatgttaagagaagaatcgctgaattggaagagaaagttgcagaagaagaagctgcactttcggacattgctatgattaccaacgtcgttggttctgaacaagtcgctgagacagctgcccgtttaactggtattcctgtgcaaaagttgacccaggccgagaacaacaagttaatcaccatggaaagggagcttagtagctctgttgtcggtcaatcagaagcagtcaaagccgtgagcaatgccatcagattgtctagatcaggcttggccaaccctaaccagcctgcttcatttctgtttttgggactttctggttccggaaagactgaactcgcaaagaaggttgctggtttccttttcaacgatgaaaaggccatgatccgtattgactgttctgagttgggtgaaaaatggtcttacaccaaactactaggatcagagccaggtttgatcggatccgaccagggtggtctcctgaccaatcaactgctccgtcacccatacagtgttatcctttttgatgaggtcgagaaggcggccccagaggttttgaacatcctcctgcagatgctggatgacggaagaataaccgcctctaatggaactttggtcaactgctctaactgtatcgtcatcatgacctccaatttgggtgctcaatttatcaattcagccaaaggcagcaagatttctccagaaactaaggagctggtgatgactgcagttagagcacacttcagacctgagttcctgaacagaatttccgccactgttgttttcaataggctctccagacatgctatctccaaaattgttaaaatcaggttagccgagattgagcaaagatttgaagccaatgctaagtccattaaattggacgtcgacgacgctgctatcgagtatttgtgcagaaacggttactcatcggacatgggagccagaccactaaatcgtttaattcaaaacgagatcttgaaccaattggctgttcttatacttaagggccaagttaaggataaagagacggtcaagatccgcctaggctcgaagggattagatgtactgccgaatcatgccgtcgaaagtgattccatggatgtggacgtagatgattgggttgacgccgctgaagaggaggattcggacaacaatcacgacgatcaagctccattgtacgactaa

SEQ ID NO: 3837 - DNA, 2343 bp, Artificial Sequence
  Optimized genes for Pichia pastoris
atgttgtctgctagaagagttttagctaaaatcaactccagaggtctggccactgtcagcggattgaccaaggactctttggttgaaatgaacttgctggaaaaaggtaactacattaattacaagcaacaattggataatgtcaacattgtcaaagaaagactgggaagaccattaacgtatgccgagaagcttttgtacggtcatctcgataagcctcatgagcaagacatcgagcgtggcgtgtcatatttgaagctgcgtcctgaccgaatcgcttgccaagatgcaactgcccagatggccattttgcaattcatgtctgccggtatgccttccgtagcaacaccaaccactgttcactgtgatcatttgatccaagctcaaaagggaggtgctgccgacttggaaagggcaattcgtctgaacaaggaggtttatgatttcttggctaccgcttgtgccaagtacaatattggattctggaagccaggttcaggaatcatccaccaaattgttcttgaaaactatgctttcccaggtgaacttctaatcggtaccgattctcacactcctaacgctggtggtcttggacagcttgctataggggtaggtggagccgatgctgtcgacgttatggcaggtctaccttgggagcttaaagctcctaagattataggtgtcaagttaaccggtagaatgaatggatggacttccccaaaggacattatcctgaagttggccggtatcacaacagtcaagggtggtactggtgccatcgtcgaatactttggtgatggtgttgataccttctcttgtactggaatggctactatctgtaacatgggagctgaaattggtgctactacttcagtgtttccattcaataactcaatggttgactttttggacgccaccgggcgatcagaaataggagagtttgccaaagttttccaaaaagagtatctgtcagctgatccgggttgtgagtacgaccaggtgatagagattgaccttaacactttggaaccacacatcaacggcccctttacacccgacttagcaacccctgtttccaagatgaaggaagttgccgtagccaatgactggccattggaggtaaaggttggtttaatcggaagttgcaccaacagctcttacgaggacatgaccagagctgcttccattattgaagatgccgccagtcatggggtgaaggctaagtcactatataccgttactccaggcagtgaacagatcagagccacaattgccagagatggtcagctaaagacttttaccgattttggaggatctgttttggctaatgcctgtggtccttgcattggtcaatgggatagacaggatatcaagaagggtgacaaaaacaccatcgtttcttcgtttaacagaaacttcacctcgaggaatgatggaaacccagcaacacatgcttttgttgcttctccagagatggtcaccgcatacgctattgctggagatttgagattcaaccctcttactgataaactgaaagacaaggatggcaatgaattcttacttaaggatccagtcggtgttggacttccagttcgtggttacgacccaggagaaaatacctaccaagccccacctgaagaccgtgcttcggtggaagtagttatttctccttcttctgacaggctgcaaagattgactcccttccagccatgggacggtaaagatgctgagagattgccaattctaattaagtctgtgggcaaaacaacgactgaccacatttccatggctggtccatggttgaaatatcgcggtcacttgcagaacatctccaacaactacatgattggagcaatcaatgctgagaacggtgaggctaacaacgtcaagaaccattacactggtgtctactctggtgttcctgatactgctgctgcttacagagacaacggagtgaaatgggttgtcattggcggtgagaattttggcgaaggtagttctcgtgagcacgctgcgttagagccaagatacttgggtggtttcgctatcattactaagtcctttgctcgtattcacgagaccaatttgaagaaacagggtttgttgcctttgaatttcacagaccctgcagcatatgacagaattcaaccagatgatgaggtcgatattctcggactgactgagttagcacctggtaagaatgtcactctgagagtccacccagctgacggcagccccacatgggaaacgccgctctcccatacttacaacgccgaacaaatcgaatggttcaagtatggttccgctttgaacaatatggctgcagttaaggcctcgaaataa

SEQ ID NO: 3838 - DNA, 732 bp, Artificial Sequence
  Optimized genes for Pichia pastoris
atgccagaggtcttgatttccaagaagagaaaattggttgccgacggtgttttctacgccgaattgaacgagtactttaccagagagttggctgaagacggatactctggtgttgaagttagagttactccaaccaccactgagattattatccgtgccacgcaaaccaactctgtgcttggagaaaacggtagaagaatcagagaacttacagcattagtccaaaagcgtttcaagattgatgaaggtaaggttattctttatgctgaacgtgtccaggacagaggtctgtctgctgtcactcaatgtgagtctttgagatacaagttgctcaatggtttagccataaggcgagcagcttacggtgtcgtcagattcgtcatggattcaggtgctaagggtgtggaagtggttgtttcgggcaaactgagggctgccagagccaaaagtatgaagtttgctgatggattcatgatccactccgggcagcccgcaaaagacttcattgagactgcgacaagacatgttctactgcgtcagggagtattgggtatcaaggtcaagatcatgagagacccagccgctgctagaactggaccaaaggccctacctgattttgtgaaaattcacgagccaaaagatgagcgtgaggttcctgctccttttgttaagtcatatgttgctgagcctgtagtagaagctgaggaggcagaagaacaagctactgcttaa

SEQ ID NO: 3839 - DNA, 486 bp, Artificial Sequence
  Optimized genes for Pichia pastoris
atgccaattgaccaacaaaagttggagaaattgcaaaaatctggaccaagaagagtcggaggagccagattgaaacagaaaaggtcaaacagagatgcagaggctgacgacaccaagctgcaggctactttgcagaagtttaatgtacagacactcactggtgtcgaagaagcaaactttttcaaggatgacggtaaggttttgcacttcaaccgtgttggtgttcaagctgctgccaactacaacacttacgccttcaccggctatgcacaagagaagaatatcaccgacttgatccccggtatcctacctcaattgggtgccgagaatcttcaattccttcagcaaattgctgagtctttacaaaagaatcctgatgctctgaatgctttgaagaaccaaaaccaggagggtgctgaagccgaagatgattccgagattccagaattagtggaaggtgaaacttttgacaagaacattgattaa

SEQ ID NO: 3840 - DNA, 1542 bp, Artificial Sequence
  Optimized genes for Pichia pastoris
atgactgtcgttgagccagtcggagatgttttcaacaccatcttagtcttggactttgaatttaacgtctacgctgagatgttgccatgcacgcagaagataagtgaacttcctttcactccaactggtgtcatcttctctggaggacccttttcagtttacgaggaaggttctcctcacgttgacaaggagatttttaatctgaatgttccaattttagggatctgttacggtatgcaagaattggcttggattgacaatgtggagaatgtagctagaggtgaaaagagagaatatggtcctgcaactttgaacgtgcaggacaaagactgtgctctgttcaaggacgttgatcactcccaagtctggatgtctcatcacgataaattgcacaatctcccgtcaggtttcaagactgttgccaccactgagaactcacaatttgccggtgttgctaatgaggcaaagaaaatttatggaattcagtttcatcctgaggttacccattctgttcaaggtaagacaattctgaagaactttgcagtgaatgtctgtggtgctacacagaactggaccatggagaacttcatcgacacagagatcaacagaatccgtacactagttggacctactgctgaagtaattggagctgtttctggtggcgtagattccacggtagcagccaagttgatgaaagaagctatcggtgatcgtttccacgccatctacgttgacaacggtgttatgagaaagaatgaaactataacagttaagaagactcttgatgacggtctgggcattaacttgaccgtcgtcgatgcgggagaacaattcttgagtcaattgaagggagtaaccgatccagagaaaaaaaggaagattattggtaacacttttattcatgtgtttgagaaggtcgctgccgatatcaaaccaaaggatggatcggaaatcgagtttttattgcaaggaaccttgtaccctgatgtcattgaatctatcagctttaagggtccatctcaaactatcaagacccaccacaacgttggtggtcttacagaaaacatgaagctgaaactcatagaacccttacgtgagcttttcaaagatgaagtccgtcatttgggtcaacttctagacattccagaagatctggtttggagacatccattcccaggaccaggtattgctattagagttttgggcgaagttactcctgaacaggttaaaatcgccagagaggccgactacattttcattgaggagatcaagaaggctggtttatataggaaaatctcccaggcctttgctgctttgctacctgtcaagtctgtgggggtgatgggtgaccaaagaacttatgagcaagttattgccttgagagccattgagacctcggatttcatgaccgctgactggttcgtcttcgaggctgctttccttaagaaggttgcatccagaattgtcaacgaagtggatggtgtggcccgagtcacttacgacatcacttccaagcctccagctaccgttgaatgggagtaa

SEQ ID NO: 3841 - DNA, 1437 bp, Artificial Sequence
  Optimized genes for Pichia pastoris
atgtcatccttcagagtcctggacttggtcaaaccttttactccatttttgccagaggtaatttctcctgagagaaaggtcccattccaacagaagctgatgtggactggagttaccctactgatcttcttggtgatgtctgagattcccttgtacggaatcacttccagtgactcttctgatcctttattctggttgagaatgatgttggcatccaacagaggtactttgatggagttaggaatatcaccgattgttacaagcggaatggtttttcaattgcttcaaggaattcagatcttggatgtcaacatggaaaacaaggctgacagagaacttttccagaccgctcaaaaggtttttgccattcttctgtctatcggccaggctactgtctatgtactcaccggtatgtacggtcctccaggtgaactaggggttggtgtttgccttctcctggttttacagctggtgtttgctggtattgtcgtaatactgctagatgaattattacagaaaggatacggcttgggtagtggtatctctttgttcatggctaccaacatttgtgaacaaattttttggaagactttcgctccaaccaccgtcaatcgtggacgaggtaaggagtttgaaggtgccttcatttcatttttccacttgattttgaccaagaaggacaagaagagagctttattggagtctttttacagagacaacgctcctaacatgttccaagtcatcgcaactcttgtcgttttcttcactgttgtgtatttgcaaggtttccgtttggaaattccagtcaaatccacccgtcaaagaggaccatacgggacgtatcctatccgtctcttctacacttcgaatatgccaatcatgttacaatctgctttgacatcaaatatatttatcatctcccaaatgctttattctcatttccctgacaatgctttcgttaagttgatcggtacctgggaagcccaacctggttctgcccagttgtttgcagcaagcggtctggcgtattacatgcaaccaccaatgtccctttctcaagctctgttggacccaattaaaacagtggtttatgtggtatttgtgctgaccacttgtgctatcttttctaaaacatggattgagatctcgggatcatcgccaagggatgttgccaagcaattcaaggatcagggtttggtcattgccggtcacagagatgctacggtttacaaggaattgaaaaagattattcctactgctgctgcctttggtggtgccactattggtgctctttccgttgtttcagatcttttgggaaccctaggatctggtacatccattttattggccgttactactatctacggttactacgagcttgcagttaaagagggtggattctccaagggtggccccagtggcttcgtcgatttgtaa

SEQ ID NO: 3842 - DNA, 1047 bp, Artificial Sequence
  Optimized genes for Pichia pastoris
atgcaagtcaagtctattgtgaaccttctcctggcctgctccctagctgttgctagaccattggagcacgctcaccaccaacatgacaagagaggtgtagtagtcgtcacaaaaacgattgttgtcgacggatctactgtggaggctactgctgcagctcaagttcaagaacatgccgaaactttcgcagaatctacacccagcgcggttgtttcaagttccagtgctccatcttccgcatcatctgcctccgctcctgccagttctggaagcttttccgccggtaccaagggagttacctactctccataccaagctgggggaggttgtaagactgccgaggaagttgcctctgacttgtcccagttgaccggttacgagatcatccgtttgtacggtgttgattgtaaccaggttgagaacgttttcaaggccaaagcccctggacagaaactgtttcttggcattttcttcgtcgatgctattgagtctggtgtctcagccatcgcttcagctgtcaaatcttatggttcttgggatgatgttcacactgtttccgttggtaacgaactggtcaacaacggtgaagctaccgtgtcgcaaattggtcaatatgtgtcgacagccaagtcagctttgaggtcggccggattcactggtcctgttctttctgttgacacttttattgccgtcatcaacaatccaggtttatgtgattttgctgacgagtacgttgcagtcaatgctcatgctttctttgatggaggcatagcggcaagtggtgctggtgactgggctgctgaacagattcaaagagtctcttctgcttgtggtggcaaagatgtgttaatcgttgaatcaggatggccatcaaagggtgataccaatggagctgccgttccttccaagtccaaccaacaggcagcagtgcaatctttgggtcagaagattggatcctcttgcattgcttttaatgccttcaacgactattggaaggctgatggtccattcaatgcagagaagtactggggtatcttggactcctaa

SEQ ID NO: 3843 - DNA, 1074 bp, Artificial Sequence
  Optimized genes for Pichia pastoris
atgtctaaagcctcaccggagacaactcatttgttgcaccatgacccttatgataagactgagagatctgctgctcaaaagtcttcttggaagaacaccctttacatcatttttgcaacagttgtctctgttccattactttatttgttcttggtctatttacccaatcttgccccagagtcagtttctgagttgcctatcatcagaaaagttgacaagttggatttctccaaccagctggaagtgcccagaagattgatacttattggtgacgttcacggttccctgaaaccattgaagaagttactccgtaagctggattacaatcctaaaggttctactgacaccgtcctgctattaggtgattttatctccaagggtccacagagcgtcgaagtagtggatttggcaatcaagaacaagttccaatgtattttgggtaaccatgagatttcagttttgcaaagatacaaccaattccacggcctcagcggcttgaaatacagaaataatgaaagtgacattgagaactatgacttgcagtcgggtcaactgtacccactagacgatgaaatgcgtttggccaagcaattgtatccacgtcacattgaatacatgggaacttgtccattcatttatgacctgggacctgtcccaagatataatcgaaagcacaccaactacaaggaaactgttgatggtgttgctgtccacgctggtttgaactggaatgtccatgaattgtacgatcaggatgttaccgaagtgacagagatgagagctatgcttcctcctgactttagtaaggctaccgatgataaatccattccaggatcagtcggatgggctaagatttggaaccactggcaaaacaacattactgattctgatgactttgacgggcttaaaaacagaaaggtttactacggtcatcatgcttccagaggtttaaatgtaaggccttacaccatgggtatcgacactgcctgcgtgaaaggagacagactgacggccgttgttatcacttaccacaagggaaagatccgtgagaaactagtatccgttggttgttaa

SEQ ID NO: 3844 - DNA, 1149 bp, Artificial Sequence
  Optimized genes for Pichia pastoris
atgtgtttgcaatctattgtcattgacttgctcacaaatttccaggttttgaaatactggggtaagagagacaccaatttgaacttgcccaccaactcttctatctctgtgacactaagtcagaaggatctgagaactctgaccaccgtcaactcctccagaaacttcgaaaaggactcattgtacctgaatggagtatcccactccatcgagaatgacagaaccactaactgtttagagcaactgaggtctttgagacaacaattggaagaagatgatcctaatcttcccaaactatctcaatggaagttgcacatcatctccgagaacaactttccaactgctgctggtcttgcgtcgtcggctgcaggatttgctgctatggtcgctgccatttctaaactctatgagttgcctcaggacgcttctgagctttctagaattgctagaaagggttccggctcagcttgtcgttccatgttcggaggctatgttgcttgggaaatgggtgagaagttagatggtaccgattcaaaggctgttcagatcgctcctcctgaacactggccaaacatgaaggcagccatctgcattgtgagcgatttgaagaaagatgtcagttcaacaagcggtatgcaaactacagtgcagaccagtgaactgttccaataccgtgttaaccaagttgttcctccaagatactctcagatggttgacgcaataaagaaccgtgactttgagactttcggtactttaaccatgaaagactctaattctttccatgccacttgtcttgattcttatccaccaattttctacttgactgacacttccaagaagattatcaagctgattcatactttgaatgatgctattggtaaagttgtcgccgcttatacgtttgatgccggaccgaatgccgttatctactacgagtctgaaaacgaagaggttgtattaggggtgctatttggtgtcctttccaacgtcgacggatggaacgagatgaactcagcaactcttaaagtccctgagggagttccattaagttcactggattccactattgcctctggtgtttcgcgagtaattttgacccaagtcggtgaaggtccaaaggaatctgacatgtttttggttgccccataa

SEQ ID NO: 3845 - DNA, 492 bp, Artificial Sequence
  Optimized genes for Pichia pastoris
atgaactcttctaaaaggtccatctccattcctcgttcattttcaaaacttctgtcttgtggtagtttcagcttagtcgcagtgtcggatgagtcactaacagccttcaacgatttgaaattgggtaagaagcacaagtacgttatctacaagatcaacgactccaagactgagatcattgttgacaagatatcaagtgatgaatcttacgatgctttcttggaagctcttccagaggacgattcacgttatgctgtttacgacttccagtatgaaatctcttccactgaaggaaagagatccaagattattttctttacctggtctccagaaactgcttctgtcagatctaagatgatttacgccagttccaaagatgcactgagaagagctttgaatggagtctcgaccgacattcaaggcacggacttttctgatgttgcctttgagtctgtattggagagagtttccagaggtgctggttctcattaa

SEQ ID NO: 3846 - DNA, 897 bp, Artificial Sequence
  Optimized genes for Pichia pastoris
atgccaattgagattaagggcaatgatgttgtgattacaagtagttccaccactcaaactcaggtcagaatcaacctgttcggtgccaccgtgtattcatggaccattgctggtaaggaacaattgtggacgtctgacgcagccctttttgacgggtccaagcctatcagaggtggtattccactcgtgttcccagttttcggaaagtcttctgctcctggatttgagaaattacctcaacacggtttcgcacgtaactctacttgggaattccttggacagacccacgccaatccgccaactgttcaatttggactatcgcccgacaatgtcaacagaaaggtttacaacaattgggacaacggtgataatgaattttccgttatttataccatcgctttggaggatgaacagttggtcacaagcgttgaaattcagaacactgaccagaaggaatggaagttcaactggttgttccacacttactttttagtagatgacattgaagataccttgattaacaacttgcctggtgaaaaatgtaacgatagggttgtccatgaaatctacactgagaagcatccaattatttcatttgatcaagaggttgacagagtctattccgacgtatcaacagacaagctgttacagatcatcgagttgggcaaagtcaagcacaacatcaagcgtgtcaatcttcctgatgtcgttgtttggaacccatggtctgagatagtaaaagaagttgctgatttcgagccaaaggagggttacagaagaatggtttgcgtggagcctggatacgttgagcaactgaagattctgaaaccaggtcaatcttggactgcttctcaaattttgcataaaggtgacgatatcaatttgcaagctatctaa

SEQ ID NO: 3847 - DNA, 603 bp, Artificial Sequence
  Optimized genes for Pichia pastoris
atgtctattcctcctgaggttttgtgggctcaaaggtccaacaaggatgacacttccaaaaatgtcgtttacttgactatcagaattgctgatcctgaaaacatcaaggttgatcttcagccaggtagcttggaatttgacgccgattccagaggttccaagtaccatttatcattagagttctttgatgaagtcgatgttgaaaaaagtaaataccacaccgctggttctcacttgttcttcgtactacaaaagaagaatgcttctgaagaattctggccaagattgaccaaggagaaggtcaaacttcattatttgcacactgatttcgacagatgggttgacgaggatgagcaagatggtgaagaggctgaccccacagtgccagatccatctcaaggtatggatttttcttctttgatgaacaacgaggccctctcgcagtcactgtcatcagatgccggtcaaccagacatggctgcactgatgcaacagctgcagaactctggtgccggaggattaggcggagaaggtgaccaagctttggaccgtgcacttgaggaggactccagtgacgaagaggaagaagacaagcaagagtaa

SEQ ID NO: 3848 - DNA, 1089 bp, Artificial Sequence
  Optimized genes for Pichia pastoris
atgtctccagccattaacattgctattattggtgccggtattgtcggttctgccttcatcaaccaattgaggagtgtgagctctttgtttgatttcaacgtcatttatcttgccaaatccaagtccgctttgatttcttacgacttcaagcctttgaacttggccaactggaaggccgacttggacaactccagtctcaatcccttaacagtagaagaattactgaagtttttgaagaacagtccgctacctgctatcctggttgataacacttcatctgctgatgttgcttttgcttaccctcaattcgtttctaatggaatatcggttgccactcctaataagaaggctttcagtggtgatcttaatttgtggtctgagattttcaaagcatccggtgaacctaacggtggtttggtttaccacgaggctaccgtcggagcaggacttccagttatttcaacgatcaatgatctcgtcaacacaggtgacaagattgagaagatcgaaggtatcttttcaggaagcttatcatacatttttaaccgtttctccacaaccaagccaaatgacatcaagttctctgaaattgtttcaaaagctaaggaacttggttataccgagccagatccaagagacgatctatcggggctggatgtggccagaaaagtaactatattggcaagattgtccggcttcaatgtcaagtctcctgattctttcccagtcgactccctggtgccccaggagttggaaaccttagagacttctgatgagtttctttcacgtttgcacgaatttgactctcaggttggacatttgaaagagcaagctgcatcagaaggaaaagtgctaagattcgtaggaactgttgactttccaaacaacaaggtttccgttggtttcggtaagtatgatgcttctcatccatttgcctcgcttcagggatctgacaatgttatctccatcaagactgagagataccaaaacccactgatcattcaaggtgcgggcgcaggtgctgaggtcaccgctgctggtgttctggctgacgtcatcaaaatcggtcaaagaatttccaaattgtaa

SEQ ID NO: 3849 - DNA, 951 bp, Artificial Sequence
  Optimized genes for Pichia pastoris
atggctgacaaccgtgaagttcttgtgttgagaggtactttggaaggtcattctggatgggtaacatcactcgcaacttgtcccacaaatcctgatattttactaagcgggtcaagagataagaccttgattgtttggcaattgaacggtgacgatcaagcttatggtgtcccaaagaaggctttgaaaggacactcccacatcgtttctgattgtaagttatccttggactctgagtttgcattatcaagctcttgggacaaaacggtgcgtttatggaatctgaaaaccggtgagattatcaagtatgctggtcacacttctgacgtgctaagtgttgacctgagtcagaacctgagagttattgcctcggcatccagagacaagactattaaactgtggaacattgtcggagaagaggttgctacccttgagggacatacagactgggttacctcagtcagatttgttccaggttccgcttccgacatcatctctgcttcttcggacaagttggtaaaatcatgggatcttaacgaaatgaagcttactgctgatttcgtaggccatactggttacgtcactgccatcactgtttcccctgacggttctttgtgtgccagtgcaggtaaggatggatccatcattttgtgggatttttccgttaagaaagtcttgtacaccctcgatgctaaggaagaagtccatgctgttgccttctctccaaacagattctggctttgtgctgccacatccaagtctataaagattttccacttggagaagagaaaaccaatggatgagttgaagccagagttcgtgtctacttccaccaaggccagggatcctcactgcatttctctggcttggtctgccgatggtcagaatttgttttctggctacactgacaatgtcatccgtgtctggcaagttatgaccagttcatcataa

SEQ ID NO: 3850 - DNA, 1875 bp, Artificial Sequence
  Optimized genes for Pichia pastoris
atgtcttcatccaacaaggaatttgatggtgactccataggatcctctgactctttggacattgagtctggtaacagagatccaaagactcagaaccctcaagcttatgttccatccgacaatgaggatcgtatgtccgagctttcccattatgcaagtacccctgatcagtctctgaaaatggtcagaaccgagaccaagaagtccttgaaggacttgggtgtttctgatgaacttcctacactggacccaaacagacctattgctgttgaaaaccccatattcccagaagagtactacctggaaactgaaacaggcctggtgcccgttgctactttgcaagatttgggaaggaatccaaccgctttggaaaagttgaggaaagagaagtctagagcttttccacagccaaatggtgaggctccaatcttgaaagatagttcagatgtcgaaactttcaaatctaaagaatactccccagagatcgagtttgtgacatttttgatcaacgatcccgaaaatccttacaactggccaacttttaccaaatgggcctacactatcatcttatcaatactcgtggttgctgtagcatttggaagctcttgtatctccggggcactgtttactgttgaggacaactataatgtcagcttggaggtcgctattctcacggtgtcattaatggtattaggattttcgctaggtcccctattgtggtcccccttgagtgaacaaattggtagaagatgggtctacttcatttctcttggtttgtataccatttttaacatcccttgcgcattatctcctaacattggtggtcttctggtttgtcgtttcctttgtggtgtgttctcttcgtcggcattgtgtttagttggaggttccattgccgacatgcacccatctgaaaccagaggtaaggctatcgcgtatttcgcagctgctccttatggtggacctgtcatcggaccattggtctgcggatggattggtgtcaaaactaatagaatggatctaatcttctgggttaacatgggttttgccggtttcatgtggttactcgttgcctgtattcctgagacttaccaaccagtcattttaaagaaccgtgctaaaaaattaagaatggaattgaataaccctaatatcatgaccgagcaagaggccaacccattaacgttcaaggaactagttgttacctgtctgtaccgtccgttgatgtttgttttcactgagccagtattggatatgatgtgtgtttatgtctgtttgatttacagtctattatacgccttcttctttgcttacccagtgattttcaacgagttgtacggctatgaagatgacttcattgggctgatgcttatcccaattcttattggagctttcttggctcttgtcactacaccgatccttgaatcaatgtacgtcaagatgtgtcaaagaagaaagcctactcctgaagacagattggttggtgctatgatcggttctccattccctgccattgctctgttcatcctgggagccacatcatacaagcatatcatttgggttggcccagcttcaagtggtatcgccttcggttacggtatggttttgatttattactcattgaacaactacattattgacacttatgctaagtacgctgccagcgctctcgccactaaggtttttttgagatctgctggtggtgctgcatttcctttgttcaccacccagatgtatcacaagctgggccttcaatgggcttcttggttgttggcctttatttcccttgccatgattctgattccatttgtattctacatctacggagcacgactacgtgccaagatgtgcaaggagaattactctgagatgtaa

SEQ ID NO: 3851 - DNA, 2121 bp, Artificial Sequence
  Optimized genes for Pichia pastoris
atgtccaaatctgaatcgtatgaattccaagctgaaatatctcaattgctgagtttatttatcaacactgtttattcaaacaaggaaatctttttgagagaattgatctccaacgcctcggatgctttggacaagattcgttaccaatctttgtctgatcctaaggttttggagactgagcccgaactttttattcgtatcacccctaaacctgaggagaaagttttagagatcagagactccggtattggtatgactaaagctgacttagtcaacaacttggggacaattgctaagtctggtactaaagccttcatggaggctcttagtgccggtgctgatgtttccatgattggacaatttggcgtaggcttttactcattgtttttagtagcagatcatgttcaagttatttctaaaaataatgacgatgagcagtatatctgggagtccaatgctggtggtaagttcactgtctctcttgacgaaaccaacgagaagcttggaagaggtaccgttcttcgccttttcttgaaggatgaccaacttgaatacttggaagagaagagaattaaggaagttgttaagcgtcactccgagtttgtttcttacccaatccagttggttgtcactaaggaggtggaaaaggacgttcctgtggaggaagaggaggaaaagaaggaagagaccgaggaggatgataagaagcccaagctggaagaagtggatgatgaagaagataaaaaggaggaggaaaagaaaatcaagaaggtgaaagaaagtgtaacggagacagaagagttgaataagaccaaaccgttgtggactagatctccttcagaagttactcaagatgagtacaacgctttctataaatcaatttcgaacgactgggaagacccattggctgtcaagcatttctctgttgaaggtcaattggagttcaaggcaattctgttcatcccaaagagggcaccattcgacttgttcgagtcaaagaagaaaaaaaacaatatcaaactatatgtcagaagagttttcattacagacgaggctgaggaactgattccagaatggttgtccttcgtcaagggtgtcgttgatagtgaggatcttccactgaacctttccagggaaatgttgcaacaaaaccgtatattaaaagtcatccgtaagaacattgtcaagaagctcattgaaactttcaatgaaattgccgaggacaaagagcaattcgagaaattctactctgcattttccaagaatctgaagttaggtgttcacgaagattcccagaacagaagtgctttggccaagttgttgagattcaactccaccaagtcaacagaggagctaacatctttctccgactacgttaccagaatgccagagcaccaaaagaacatttacttcattactggtgaatcggtgaaagcattggaaaaaagccctttccttgatgccctaaaggagaagaactttgaagtcctcctattgaccgatccaattgatgaatatgccatgacccagctgaaagagattgaggacaagaaactggtcgatatcactaaagactttgagttagaagaaagcgaagaagagaaaaaggctagagaggaagaggtcaaagattttgagcctcttaccaaggcgctcaaggagattttgggtgacaaggtagagaaggtcgtcgtgagctacaagttggtcgactctccagctgctattagaacttctcagtttggatggtctgccaacatggagagaatcatgaaggcccaggcactcagagataccaataccatgtcttcatacatggcttctaagaagatcttcgaaatttcaccaaagtcccccataatcaaggctctgagaaagaaggttgaggcaaccggaactgacgaccgtgtagtgaagaatttaacaacactgctgtttgacactgctctattaacgagtggatttactttggatgagccaacttcatttgctgcccgaattaatggattgatttccatcggtttgaacatcgacgaggaagaagaaaaagaacctgaacaggctactgaagctccatctgaggaggccgttgccgaatctgctatggaagaggttgactaa

SEQ ID NO: 3852 - DNA, 375 bp, Artificial Sequence
  Optimized genes for Pichia pastoris
atgactttccatttctccattattttccacatcagatttaccaatacatttttggacaacactaaatcaaatcagatcaaagttatcaagactcctggaggagtgttgagagctcaacacaccaagaagagaggtaccactcccaaatgcggcgattgtggtatttctcttccaggtgttgtagcactgagaccaagagagttttctcgtgccaagaaatctgacaagtcggtcagtaggccttacggtggttccagatgtggaaactgtgtcaaggagagaatcattcgtgctttcttgattgaagaacagaagattgttcaaaaggttttaaaagaacaagccgagaaggaaaagcaagctgagcagaactaa

SEQ ID NO: 3853 - DNA, 6648 bp, Artificial Sequence
  Optimized genes for Pichia pastoris
atgtctagcgtcaaccactcactaagacactccaagcttccacctcattttctcggactgaactccgtagaagtcgccgctccttctaaggtccgtgactttgttagagatcacggtggccattctgttattaccagagtcttgattgccaataatggtattgctgctgtcaaggaaattaggagtgtgagaaagtgggcttacgaaactttcggaaatgaccgtgctattcaattcattgttatggctactccagaggatttggaggctaacgctgaatatatcagaatggctgaccaatatgtcatggtacccggtggtactgctaataacaactatgccaatgttgacttgatagtcgagattgctgaatcgacagatgctcatgctgtttgggcaggttggggattcgcctccgagaaccctcacttgccggaacaactggctgcttcccctaaaaaaattatctttatcggtcctccaggtagtgctatgagaagtcttggagacaagatttcttctaccattgttgctcaacatgccaaagttccttgcattccatggtctggtactggtgtcgaccaggtgataattgacccagtgtctaacctggtttcggtggatgaagagacttatgccaagggatgctgtagtgaccctcaagacggcctggccaaagccaaggccattggcttcccagtaatgatcaaggcaagtgagggtggaggtggtaagggtatccggaaggtggacagggaagaagattttttgtctttgtatgaccaagccgcaaacgaaattccaggatcaccaatattcatcatgaaacttgctggtgacgcaagacacttagaagtccagctgctcgctgatcaatacggaactaacatttcattgtttggaagagactgttccgttcaacgtcgtcatcaaaagatcattgaagaagctccagttacaattgcgaaacaagatactttcagacagatggaacaagctgccgttcgtcttggtcaactagtcggctatgtgagcgccggtacggttgagtatctgtacagtcacgccgaagacaaattctacttcttggagcttaatcctagacttcaagtggaacatccaaccacggagatggccactggtgttaacctcccagtcgctcaattgttgattgccatgggaataccattgaacagaattcgtgatatcagggtcctctacggtttggagccaaacggtgccacagagatcgacttcgagttcaaaactgaagaatctttgaaatctcagagaaagcctattcctaagggtcacactattgcttgtcgtataacctccgaagatcctggtgaggggttcaagccatcaggtggtgcattatacgagttgaactttaggtcttcaagttcagtatggggttatttctcagttggaaacaagtcctccatccattccttctctgactcacaattcggtcatatattttcatttggcgagaaccgtcaaattgcacgcaagaacatggtggtggctctgaaggagttgtccattaggggagatttcagaacaactattgagtacttaatcaagttgcttgaaacagcagattttgaaaacaacaccatcaccactggatggctggacgaacttattagtaaaaagctgacagctgaaagacctgacgagactactgctatcttgtgtggtgctgagaaaggacaaattccaggtaaggaactgcttagaacgattttccccattgaatttatttacgagggaaagaaatacaagttcaccgttgtacaggctgcttttgataagtacaatgtctttgtgaacggttgtatgattactgtttccgtcactcacctcaaggatggttccctattagtagcccttgacggtaagtctcactctgtctactatttgcaagaagaggtgggtaacacacgattaagcgtagatggaaagtcttgtattctcgaggttgagcacgagccaactgagctgagaaccccatctccaggaaaactgatcaaatatcttgtggagcacggtgaccacgtgaagattggtcaaccttatgcagaagttgaagtgatgaagatgtgtatgccattggtctcccaggaaaatggaacaattcgacttctgaagcaacccggaagtagtgttgccgctggcgatattcttgctatccttgccttggacgacccttccaaggttaaacacgctcttccatttgacggtaccattcctgacatgaagcagccattcattcacagtaacaagccagtttacaaatttataagccttctttcagtcttaaaaaatatcttagccggttacgacaaccaagttgtcatgaacgacactttgcaatctttattggacgttcttaagaatccagagcttccttactctgaatggaaccattcaatctccgccctgcactccaggttgccaattcatttggacgagcagttaacctcactaattgaaaggtcacaccaaaggggcgctgactttcccgctaagcacctactcaagttgctagacaaagagcaagcggtgaatccggatccacttttttctcaagttatcgctcctttgactgctgtagctaagtcttatgaacacgggttggaagttcatgaacacaacgtttttgccgatttgatcacacagtactacgatatcgagtcactgttcgctgacaagagagaggaagacgttatcctgcaattgcgtgatgagaataagtcatccctggacaaggtgattgatgttgttctgtctcattccagagttggtgctaagaaccatctgattagagctattttggagatctaccaaaccatctgtcagaacgatttgcaggccgccactatcttgaagaagccgttgaagaagatcgtcgaacttgattctagattcactgctaaggtttctttgaaggctagagagattttgatccaatgttctttgccctctatcaaggagagatcggaccagttggaacatatcttacgttcttctgtcgtccaaactcagtatggtgaatcctttaatggtaactacaagttgccaaatctggatgttatacaggacgtcattgactccaaatatattgtatttgacgtccttactcaatttgtcgtttctcctaacaagtacatttttgctgcagctgccgaggtatacctgcgaagagcctaccgtgcatattctgtgagggaggtcaagcatcatttcgtcggtgattcggcattgcctatcgttgaatggaagttccaactgccactgttatctacagcggcatacaactccgtccctgaagcaatgagaaactcatcttccaatagatctagcatctctatggacagagctgtctccgtttctgatctcacattcatgatcaacaagaacgactctcaacctttgcgaaccggtatcattatcccaaccaatcatctcgacgacattgaggagtctctatcgtctgccatcgatgttttcccaaagaggcctcgtaacaacggtcctgctccagataggaccaacgtagcaccagaacagcccaccaacgtctgtaacgtgtttatcgcaaatgtatccggttacaactctgaagctgagattgttgacaagataagctctgttttatcagagctgaaagacgatttgcgtgcgtctggtgtgcgtcgcgtcacctttgttttgggtgataaggtaggtacataccccaagtattacacttttaagtttccagactactttgaggatgagacaatcagacatattgagcctgcattggccttccagctagaactcagaagactctccaacttcaacatcaaaccggtcccaaccgaaaataggaatatccacgtctatgaggctgttgctaaaaacacttcatgcattgacagaagattcttcacgagaggaatcatccgtacttcccgtattagagaagacgttactatttccgaataccttatttctgaggccaacagattaatgtccgatattttagacgctctggaaattatagacacttcgaatactgatttaaatcacatcttcattaatttttccgctgtgttcaacgttactcctgatgacgtggaagccgcatttggtggtttcctggagcgtttcggtcgtagattgtggcgacttcgtgtttcagctgctgagatcagaatcatgtgtactgatcctgagaccggaattcccttccctttgagagctttgattaataacgtttctggatatgttgtgaaatctgagatgtatcaagaggttaagaatgatcatggtgaatgggttttcaagtcgttgggacctactccaggttccatgcacttgagaccaatcagtacgccatacccaacgaaagaatggcttcagccaaagagatacaaagctcacttgatgggtaccacctacgtttatgatttcccagaattatttagacaagcaactttgtcccaatggaaaaaatactccccaactgccagagtgccaagcgatgtcttcgttgccaacgaattgatcgtcgatgattcaggcgaattgacagaagtttcaagagaacctggtgctaacgtcgttggtatggttgctttcaaagtcactgcaaagaccccggagtatccaagaggccgtcacttcatcatcattgccaatgacattaccttcaagattggttcatttggtccacaagaagatgaatacttcaacaaagccacccaattggcacgtaagttagggatcccaagaatttatttaagtgcaaattcaggagccagaatcggcgttgctgaggagttgctgcctttattcaaggttgcttggaaggaggaaggtaaaccttcaaaaggttttgagtacttgtacttgacctcggaggatctgactctgctcgaaaaaagtggtaagtctaattcggtaactacccaaagaattgtcgaagagggagaggagcgccacgttattacagccattattggtgcctctgacggtttaggagtcgagtgcctgagaggttctggtcttattgctggagctacctctcgagcttacaaggacatcttcacaatcactctagtgacttgcagatctgtcggaattggagcgtacttggttagattgggccaaagagcaattcaaatcgaaggccagcctattattctaactggggccccagctatcaacaaactattgggtagagaggtctactcatccaacctacaattgggtggaacccagattatgtacaagaacggagtttcccaccttacagccaacgatgatctagctggtgttgaaaagatcatggactggttggcttacgtcccggcaaaaagaaacatgcctgttccaattctggaaagtttgcatgacaaatgggatcgtgatgttgattataaaccaaccagaaatgaaccatatgacgtaagatggatgataagtgggcgtgaaacccccgatggtgagtttgaatctggattgttcgactccggatcttttaccgagaccttgtcgggctgggccaagggtgttgttgttgggcgagctcgtctgggaggaattccaatgggtgtcatcggagtagaaacgagagttaccgagaatttgattcctgccgatccagccaacccagattccactgaaatgatgattcaggaggctggtcaagtctggtaccccaactctgctttcaagactgcccaagctataaatgatttcaataacggtgagcaattacctctgatgattttggctaactggagaggtttctccgggggtcagagagatatgtacaacgaggttttaaagtacggttctttcatagttgatgcacttgttgacttcaagcaaccaatttttacttacatccctcctaccgctgagctccggggaggctcttgggttgtcgttgacccaacaatcaacgaggatatgatggaaatgtacgctgatgtagagtccagagctggtgttttggaacccgaaggaatggttggtattaagtacagaaaagataaattgttggctaccatggagagattggatgccaaatacgccgagctaaagtcaaaggtcagcgacacctctctgagtgaaaaggatgtctcagaaatcaagaaacagatcgaacagcgtgagaagcagcttttgcccatctatgctcagatttcgatccagtttgcagacttgcacgatagatccggtagaatgttggccaagggagtgatcaagaaggagctagagtgggtcaatagtcgcagattttttttctggagagtcagaagacgtttgaatgaggaatatttgatcaagcgtatcactgagtttttatcggcttctgctactagactagataaaatctctcgtatcaattcatggttaccaacttctattgatcttgaggacgatcagaaggttgccatttggttggaggaaaacagaaaggctttggatgctaatattaaagagttaagagccgagcatgttagaagaactttagctacattggtcagaactgacatggataccacatctaagagccttgcagagttaattaacttgttgcctgaaactgagaaggaaagcattctttccaagattaagtcctaa

SEQ ID NO: 3854 - DNA, 1698 bp, Artificial Sequence
  Optimized genes for Pichia pastoris
atgtcattttctccaagaattgtccctactaccgctttctctgaccaaaagccaggaacttctggtttgagaaagaaggtcaccgttttccaacagccaaactacaccgagaacttcttgcaagctatatttgactctattcctgaaggtgctcaagattccgttctggtcattggaggtgacggtcgttactacaacgacaccgtagtgcagttgatcgctaagattggtcttgcaaacggtgttaagcgtatcatcgttggtcaaaacggtattttatcaactccagctacctctcatatcatccgtacgtataaggacgtcaaacctaccggtggaataattttgactgcttcccataacccaggtggccctaccaacgatttaggtatcaaatacaatttgagcaatggtggtcctgctccagagactgtcactgacaagatgtttgccaagtctctcgcattaacagaatacaagatcatcgaaaatcttccaactattgacttatccaaacttggcctttccaagtgtggtcctttggaggttgacattatccactccactgaagcttacgttgaaatgttgaaggatattttcgacttcccattgattaaatctttcatcaagagaagatctcctgagggtttcaaggtgctctttgatgcccttaatggggttactggaccctatggtaagtcaatttttatcgatgagttgggacttcccgaatcctcgattcagaactgtgttccaaaggctgatttcggtggtttacatcctgatcctaacttgacctacgccaaaactttggtggatagggtagacaaagagaatattgcctttggtgctgcttctgatggtgatggagacagaaacatgatttacggagcctctacctttgtttctccgggagattcagttgctatcattgctgaacacgctgagtccatcccatacttcaaaaagttgggtgtccacgggctggctcgttccatgccaaccagtggagctctggacttggtcgcaaaagccaagggtctgaacgtttatgaagtccccacaggatggaagtttttctgtgctttgttcgacgcaaagaaattatctatctgcggtgaggaatcgtttggaacgggctcagaccacatcagagagaaagacggattgtgggctattgttgcctggttgaatgttctcgccgccttcgatgctcagcatccagaaattgagggcggtgcaaccattgcattggttcagaaaaatttctgggaaacttacggtagaactttcttcaccagatatgattatgagggatgtgagtcaattccagccaacaagctgatcgagttccttcaagaaaaggttgatgacacttcattcgttggatctgaattggctcctggttacacagtgaaggaagccgctaatttttcctacactgatttggatggctctgtcagtagcaagcaaggtctgtttgtcaagttcacatctgggctgagatttattgtgcgactaagtggtactggttccagcggtgccacaattcgcttgtatcttgagaagcacacttccgataaatcaaagaacagtctatcggcatctgagtttctagcggacgatgttagattcgtcttgaactttctgcaatttcaaaaattcgtaggaagagaagagccagacgtaaggacataa

SEQ ID NO: 3855 - DNA, 324 bp, Artificial Sequence
  Optimized genes for Pichia pastoris
atggctgaggagaacagattgtatgtgaaaggaaagcacgtttctttccagaggtccaagtctgtcattcatcctaaaacaagcctgatcaagattgagggagttgaaaattcaaaagatgctgaattctacattggtaagagaattgcttacgtttacaagggtgtcaaggcaatcaacggtaccaaggttcgtgtgatgtggggtactgtcaccagaactcacggtaactctggagtcgtaagagccaagtttgaaagaaaccttccaggtcaatcctttggcagtactgttcgtatcatgttgtatccatcaaatatctaa

SEQ ID NO: 3856 - DNA, 1251 bp, Artificial Sequence
  Optimized genes for Pichia pastoris
atgtccctgtcaaataaactgagtgtcaaagatttggacgttgctggtaagagagtcttcattagggtggatttcaacgttccgctggatggtgacaagattaccaacaatcaaagaattgtcgcagctcttccaactatccaatacgttttggaccacaagccaaaggttgttgtcttggcctcccatctgggccgtcctaatggtgaagtcaaccctaagttcagcttgaagcctgtggctgctgagctttcatctctattaggaaagaaggtcacctttttgaacgattcggtgggaccagaggttgaaaaagccgttaactctgcttctaatggcgaagttatcttgttggagaacttgagattccacattgaggaggaaggttctcaaaagaaggacggtcaaaaaatcaaagctgacaaggaagctgttgctcgtttcagaaagcagctcacagcactagctgatgtttatgttaatgatgcattcggtactgctcacagagcccattcttccatggttggatttgagctggaacagagagctgcaggtttcctgatggctaaagagttgacttactttgcaaaggctttagaaaacccagtcagaccattcttggctattttgggtggagctaaggtatcggataagatccagcttattgacaaccttttggataaagttgactctatcatcattggtggaggtatggccttcacttttatcaaggtgttagacaatgttgccattggaaacagtttgttcgacgaggctggagcaaaacttgtacctgggttagtggagaaggccaaaaagaacaacgtcaagttggtcttaccagttgattttgttaccgcagatgctttctccaaggatgctaaggttggtgaggccactgttgagtctggtattccagatggattgcaaggtcttgatgccgggcccaaatcacgagagttatttgccgctaccattgccgaagccaagactattgtttggaacggtcctcctggtgttttcgagtttgacaagtttgctgaaggcaccaagtctatgcttgctgccgcgataaagaatgctcaaaatggaggaacagtaatcgtcggtggcggagacactgcaacagtggccaagaaatttggtggtgccgacaaactctctcatgtttccacgggtggtggtgcttcactcgaactgttggaaggaaaagaattgccaggtgtcgtctacctatccaacaaggcttaa

SEQ ID NO: 3857 - DNA, 861 bp, Artificial Sequence
  Optimized genes for Pichia pastoris
atgtctaaccagtacaacccatacgaacaaaaccaatcttatgaattgcctagttacaagggtggtaataacgatgattttgtgaagttcatgaacgagattgctgatatcaatgccaatttggacaactatgaggagttagtgaaaatcatcgagcaaaagcaaactcaattggtcaatgaagtcaaccctgaccaagagaacagtcttaagagacagcttgattctttgatttctgagtcttcgagcttacaactatcactgaaatccaagatcaagaacgcccaacagctcgccattggtgattccgcaaaagtcggtcaagccgagacctcacgacagagatttttgcaagctatccaagattatcgcattattgaatcaaactacagagagcagcagcgtgtgcaggctgagagacaataccgtgtagtcaagccagacgcttctccagaagaggtcagagatgctattgacgatctgggaggccagcaagttttctccactgctctgttgaatgctaaccgtaggggggaggctaaaacagctttgcaggaagtacagtccagacacagagaacttcaaagattggagaagaccatggctgaattaacgcaactgtttcatgacatggaagaaatggttgttgaacaggatcaacacgttcaagaaactgaaaatctagttgacaccgctcaacaagacattgagaaagcagttggacatactgacaaggccttgacatctgccaagaaagctagaagaaagaagtgtatttgtttctggatctgtgttttgatcatttgcattcttgcactgatattgggattaggattcggtgttggtaactggggtcgttaa

SEQ ID NO: 3858 - DNA, 1035 bp, Artificial Sequence
  Optimized genes for Pichia pastoris
atgaaccaaattgagcaatctggacctattgactgcagctcgctcaaactagggtccagaaagagtgcattggccatcattcaggcagaaattgttagacaattgattttaaaagaatatccagagctagaaactaagttggtttctgtgtcaactttgggagaccaagtccagaacaaagcattatttactttcggtggtaagtctttgtggactaaagaattagaaatgcttttgttggagtctgttggaggtttcgaccagattgatatgattgtccactcattgaaggacatgccaacccacttgccagatgagtttgagttgggttgtatcatcgagagagaagacccaagagatgctcttgttgtccaagatggtttgtcttacaagagtttggctgatctgcccgaaggagccgttgtgggaactagctcggtcagaagatctgctcagcttctgaagaactttccacacctcaagttcaagtccgtacgaggtaacttgcaaaccaggctacgtaaattggatgaccctgactccgagtactgctgtcttcttttagctgctgccggacttataagaactggcctccaacatcgtatttcaatgtatttgaatgatgatgtgatgtaccactccgttggtcaaggtgccctgggtgttgagatcagaaaaggtgatcaattcatgaagaatatctgtgagaagattggacataggacaacgacactgagatgtttagctgaacgcgctttgctgcgttacctggaaggcggatgttctgtccctattggtgtcagtacaatctactctgaggacaccaaggaattgaccatgaattcattagtcgtttcctgtaatggtagagactctgtaaccgagtccatgactgaagttgttaccactgaggagcaggccgaagattttggtgagcgtcttgctcaaaagctgatcgatcagggtgctaagagaattttggacgaaatcaacttcaacaagatcaaggagataaaagaggaaggtcttcattaa

SEQ ID NO: 3859 - DNA, 792 bp, Artificial Sequence
  Optimized genes for Pichia pastoris
atgtcagcatccacttactctttcgaccaagctatggattttgacattgttcaatctgttacatcaactcaggaccacattcctatggttcttggtgaaagtgtgttacgttcgtttgttggtaatgatgctaacaaggctccagctattaaacaggagtacgaggcccttcccctaaatgctcaaattgtcaacccagagttgactccgtccgtcggcaccatctctcctttggaaatccacaccagtgtgttagacagcgtcctaagtaccgatttcactgatgccgacaattcaccaatgtttgagagcccagaatctgaagacccaaacaactgggtttccctgtttgctgatgaaacgacacttgccaccactcctgctgtttctcgtgcacctgcagcctctgcttctcccgtcgttccatctttgaagactacatcaggagatgagcaacagttgaccgtgaagcaattcgttgaatatccttccgctaaggacaagctgtcgccaaagtccgtagagaagaagatttccttcaagaaagatcatttgggtgttgttggatacaccagaagacaaagatcttccccattggccccaatcgtcgtcaaggatgatgaccctgtatcaatgaagagagccagaaacactgaggctgctcgtcgaagtagggccaagaagatgaaaagaatgtctcaattggaggacaaagtggaagaactcttaatctgtaagtctgagctggaagctgaagttgagagattgaaatccttggtcaaacatcagtaa

SEQ ID NO: 3860 - DNA, 561 bp, Artificial Sequence
  Optimized genes for Pichia pastoris
atgggaaaagtccacacttcaaaacagcacgtcaagaccagtcacagaaaagcaccaaagtctgagaatacttacttgaagtccctggttgaactttactcttatctagcaagaagaactgatgctgagttcaacaagaaggttcgtcgtgcattgaacttttccaagatcaacagaccaccagtttcggtaggcaaaatttcacaagctttgaaaaaggaagaaaacgctggtaagattgttgtggtggttggtaccgtcactgacgatatcacccttttggagtttccccaggctaccattgctgctctgagagttacggccactgccagagccaagatattaaaagccggtggtgagatccttactttggaccaattggccctcaaggctcctcaaggtgaaaatacattactgttggctggaagcaggacagcacgagaagcttgtcgtcatttcggattcggtcctcatcagaagaaagctccaagaattttgtctaccggaagaaagtttgagaaggccagaggtagaaggcaatctcgtgctttcaaggtctaa

SEQ ID NO: 3861 - DNA, 1155 bp, Artificial Sequence
  Optimized genes for Pichia pastoris
atggatatcgcacttgaaatcttggacaccttcgtctttgacaaggtttatgccaagttgttacctatctccttggttcaacacttgcctgatggatatctcaagactttaggtcacctaacaggagccaacaacaccatggaatcattgttcggtattgcccctaacgttgaccaagcctccaagaatcactggcttcgaactgtgaatgactctattgctttggcccgcccgggcgaacgtcttgtgtacggagtgaatgctcccttacatttcttcgatgagactgcttacacttacgcctctatcctggggcgttccaacattattcgtcaatttaccaccctgatgatattgatgattctctttggttggggtttgtacttaagcgtagccagtttttcttactactttgttttcgacaaagctattttcaaccatccaagatatcttaagaaccagatgtctttggagattcatcaggcattaaccgcaattccaactatggttcttttaacagtcccatggttcttgattgaattgagaggttactccaaactgtattttgatgttaacgagtctactggaggatggaaggctatcatctggcaaattccttgtttcatcatgtttacagactgttgtatctacttcattcacagatggttgcattggccatctgtttacaagagacttcataaaccacaccacaaatggattgtttgcactccatttgcttctcatgctttccaccctgttgatggctatgctcagtcacttccttaccacctgtacggtatgctttttcccttgcacaaggtcagttatctaatattgtttggattggtcaacttctggactgttatgatccatgatggtgagtacttgtccagagacccaattgtcaatggtgctgcttgtcacactgtccatcatttgtatttcaattacaactacggtcaattcacgacattgtgggataggttgggtggttcatacagaatgccagacaaggagctgtttgacaaaaacaagaagaaagatgtcaagacctggagatcgcaggtaaagcaagctgactccatcagagaggatctggaaggtaaggaagatttcagagaatatggtactgaggagaagctgaaatctacctaa

SEQ ID NO: 3862 - DNA, 237 bp, Artificial Sequence
  Optimized genes for Pichia pastoris
atgccaagacagattactgacatcaagaagtttgttgagttaaccagaagagctgatgtcaagtctgcaacggtgaaaactaattccaagttcaactcaaaaggagagaagtaccaacagacaaaattcaaggtcagaggtgctcgttatctttacactctaattgttgaagatgctgacaaggccaagaaactggtacaatctttgccacctcaattgaaggttaccaagttgtaa

SEQ ID NO: 3863 - DNA, 582 bp, Artificial Sequence
  Optimized genes for Pichia pastoris
atgcctcgtgctccaagaacttattcgaagacttactcagttccaaagaccccttacgatagcgccagatttgaccaagaacttaaacttgctggtgagtacggtttgaagaacaagaaggagatctacagaattggtttccaattgtccaagatcagaagagctgctagagacttgttgaccagagatgaaaaagatcctaaacgtctatttgaaggtaacgccctgatccgtagattggtcagaacaggaatactaagtgaagagaaacgaaaattggactacgttcttgcactcaaagtcgaagatttcttggagagacgtctgcagacccaagttttcaagttgggcctggctaagtccattcatcacgcccgtgtattaatctctcaaagacatattgctgttggtaagcaaattgttactattccatctttcatggtgaggttagagtctcagaagcacattgactttgcttccacttcaccctatggtggtggaagggcaggaagagtcaagagaaagaatcaggccaagtcttctgaaggaggtgctgaggaagaagaagaggatgaggagtaa

SEQ ID NO: 3864 - DNA, 936 bp, Artificial Sequence
  Optimized genes for Pichia pastoris
atgattttcaacttgaagactttggctgctgttgctattagcatatctcaagtttctgcggtaagctccctcggatttgctttaggtaacaagaatgtcgatggaacttgtaagtatctggctgactacgaggctgatttggacactatcagaggtggttctgaagcagttgccatcagggcttactcagctgaggactgcaacaccttgcaatatttaggaccagcagtggaagagaagggtttcaagttggtgctttctgtcagacctctagatgagtcttactaccaggctgaaaaaaatgcactctcggagtacttgccacagctttcagtgagtaccctacagtttctttccgtaggctcagaagctttgtacagagatgatttacctgcttccgatctggccgacaagattagagacatgaaggagttccttgctggtttgactgacaaaaacggagactcatactcttctgttccagtcgggacgatcgattcttggaacgttttggttgacgcttctgccgcacctgcaattgaggcctctgatgctgtctatgccaatgctttctcctactggcaaggtcaaggacccagtaactctacatattcgttctttgacgatatcatgcaagctctgcaggtcattcaaaccatcaagggctccaccgatattgatttctgggttggtgagactggttggccaacagacggtgacaactttggagatgccgtcccatccattgaaaatgccgataatttttggaaggaagccatttgtggtattcgtggatggggtatcaacactttcgttttccaagcctttgatgaagactggaaagaagaagatgacgccgttgagaaccactttggtgtttgggattcaagtcgtcaattgaaactggactccttgggttgtgacttctcttcctaa

SEQ ID NO: 3865 - DNA, 870 bp, Artificial Sequence
  Optimized genes for Pichia pastoris
atgttcagactaagtgttgctaatatcgcaagatccgctggtgcctcaacgaggaactatgcaacattacgtgagattgagatgagactaaaatcaattaagaatattgaaaagatcaccaacaccatgaagattgttgccagtaccagattgaacaaagctcaaagagccatggctacttctcgtgtttaccacgagggagatcaggaggtgtttaccactgctgagaccaaggctccagaagacgcagagaaaactttattggtcgtagtgagttcagacaagggactttgtggttccatccattctcaaattgccaagtctgctcgtctgaggctgaaagacttgccaaatgcagatgttgtcaccattggtgataaaactaaggttcaattgttgagaactcaccctaacaacgtcaagctgtcattcaacggtatcggaaaggaagctcccactttctacgaggctgctttgattgctgacgaaatcaagaagcttggagactaccagaaaatagaggtgctctacaacaagtttgtttctggtgtctctttcctgccttctgaatttagcgtattctctactgatgccattaaagcctccgagaagttgtccacttttgaagttgatgaagatgctgaaattccagctaccctttcggaatatggcttagccaactccattttgagcgcattggctgatggttacgcatctgagatctctgccagaagaaacgctatggacaatgcctccaagaacgccggtgacatgatcaacaagtattcgatcttgtacaatcgaacaagacaagctgtcattacaaatgaacttgttgacattatcactggtgcttcctctttggattaa

SEQ ID NO: 3866 - DNA, 279 bp, Artificial Sequence
  Optimized genes for Pichia pastoris
atgtcttcatttttggacagatggttatacagaatgagaggtacttccaacactggatcttactattcaactcctcaactgtcaacccgttccagtggtttcccagatgatgaccctcagaccaccactccaaacttgagaaacacaccaagagcttacttccaccctgttattccaggtgatccccttacagaggaagagtctttgaagatgaagaagtcttctgttgactcccgtaaaagctcggtggtctctgccagttccgaagaaaatgagtaa

SEQ ID NO: 3867 - DNA, 438 bp, Artificial Sequence
  Optimized genes for Pichia pastoris
atgaacttgccagtcaatgccgaaaggaagaagagaattctgaaatcttattcatacagaggtatcgatcttgaggctctgctcaaattaagtaatgaggaatttggtaaattatgtacctcttcggtccgaagaagattctcccgtggactaggtgacagagaggagcgtttcttgaagaaactgagagttgtcaagttggccactccacccaatgaaaagccagcagttgtgaagactcacttgagaaagatgatcgttgttccagagatgattggatctgtagtgggcgtctacaacggaaagattttcaacacagttgaaatcaagcctgaaatgttgggtcactatcttggtgagttttccatgacctacactcctgttcgtcatggtaaggctggtgttggtaacgctgccagatttgctgctttgaaataa

SEQ ID NO: 3868 - DNA, 171 bp, Artificial Sequence
  Optimized genes for Pichia pastoris
atggctcatgaatcagtttggttttctcatccaagaaactacggtaagggatccagacagtgcagagtctgtgcttctcaccaaggactgatcagaaaatatggtttgaacatttgtcgtcaatgtttcagagagagagccaatgatattggtttccacaagtaccgttaa

SEQ ID NO: 3869 - DNA, 993 bp, Artificial Sequence
  Optimized genes for Pichia pastoris
atgtccgcctctcaattcatgaagctgccttctttgcaaccaagctctgaacagaatgcacttccacctttgcgctcgttagcagctggtttattcccaactcgtctgatgtctgagaactccctatccatgcaacacaattcctctgctttcttggactcttattcactttcaagaggttcccttagcccgccaatgtcacagggtcttgagtccattggtagacgtagtcttccttcgctccctaccttttcttttggtgacgttagaaacaactctttaacctctacgagctccagagcttcttccctgtctggagatgatgttgagtcaactccctctgtcccaaacagtccaggttctattcatgctcctggatcaatatcaagtctgcgaggaaaaaggcgtcaaagatccggcccttcctgcgatgcttgccgtgtcagaaaggttaagtgtgacgccgagatcatcatttccgactaccaggatctatcaattgatgagaagttgatgtttgacaagaacactcaggacaaccaaactttccaattgtccaatggatttaccatcttgaagactctggtaaatatcaagtcatcgagagatgaaaaatatattaaatacagatcatgcactgcttgtaacaataggacattaaaatgctgtttctccaagggtttcaccagaaatgacattgtcaagtacaacaagttcaagtccgagtcttctgacgaagaatgttctgttgccaagagagcaaaaacagctcaaaccactcctcctccatctaccaactttgattctagttcatcctcgctctctccaaagtctactttgaccgcccccagcagtgtgacaccaccattgttgccagccagaagatcttcttgtttgaactgtcgttctaagaagatcaaatgtgctagattggaagactccgaaagatgtactcactgtgataagaaagatttgtgttgttcctttgagtaa

SEQ ID NO: 3870 - DNA, 4971 bp, Artificial Sequence
  Optimized genes for Pichia pastoris
atgtcttctgatattccaattgaattcaccgagccattgcaactgaccgacatcggtatccaaccacaatttctggactttagatccactacattggaatcggacagattcgtttgtgttcgtgagcaaggcgccaacggtaacaccgtctctatcattgatttacacaacaacaacaatgtgaccaagaagaacatgaccgctgataatgccatcatgcacccatcgcagaacgttatctccctaagagccaatggaacaacattacagattttcaacctggatactaagcagagattgaaatcttttacaatgagtgaaccagttatattctggaaatggttgaacgagcagaccttaggattggtgacacagaatgcaatatttgaatggaacgtgtttgacggaacgggtgatggtccagtgcgcctcgctgacaagcatgtgagcttgactaacaaccagatcatcaactacgtttccaacaaagacaatacatggattgccgtcactggtattgctcaagaggaaggtagaattgtaggtcatattcaactatactccaaggctagaaacatttcccaagccattgatggacacgtttgcaactttgccaccttgaagttgtccggtgcctccgttgacacccaagtgttcgtctgtggtaacagaactgccactggcggccaattgcacgtcattgagatcgaccaccaagagggagctccagtttttcaaaagaagaacgtcgatattttcttccctgctgacgctgctaatgatttcccagtatcagttcatgtttcgcagaaatatggtatcatttacctgttaacgaagtacggttttatccatttgtacgacgttgagtcatctacctctctttttgtgaaccgtattagtgctgaacctgttttcactgctgctagctacaataacggcacaggaataatagcgatcaacagatctggacaagttctgactgttgacttatctcgtgagtctttcattccttatattctaaataaactgtcaaatattcctttggccctgtctttagcttccagatcgggattaccgggcgcggagaacttgtttactcaacaattcaaccaatgtttagcctctggtgattatgataatgccgctaagatcgccgcgagcagcgaacagctgagaacctcagagactatcaacaggctgaagaacctacagccagctcccggtcaaatttcacctatcctttcctacttctccatcctattggacaaaggtactctcaacaaattcgaaagcatcgagctggccaaaccagtcttgcaacaggataaaaaacctctgttcgagaagtggttaaaggaagacaagttgcagtcttctgaagaattgggcgatattgttaaaccctttgataccactttggcacttgcagtttacatgagagctcaagttcctgtcaaggtagtgtcttgtttggctgagattggccagtttgataaaattttgccgtattgtgaaaaggtgaattatcatcctgagtataccatcttgattcaaaacatcgtcagagtcaacccagacaaagccgcagagtttgctacttccttgttgagacaaactccaggtttggacattgagaaaatcgctgatatcttcttgtcacagaactacatccagcaaggaaccgcctttttgctcgatgccttgaaggatgacaagccagccgagggtcacttacaaacacgtctcctagaaattaaccttctccacgctcctcaggttgctgatgcaattttgggaaacaatatgttttctcaatacgaccgacccactattgctgctttggctgagaaggctggtttgttccaacgtgctcttgagcatttcgacgatatcaaggacatcaaaagggtcatcgttaacacacaagctttcccaactgactggctggttaactatttcggtaagctgaatgttgaacaatctgttgcctgtcttcgtgaaatgttgtctaagaacattgctcagaacttgcaagtcgttattcaggttgctaccaagtactctgacttgattggtcctgtcaccctgatcaaggtcttcgaagaatttaagtgtactgagggtgaatattactatttggcctcaattgttaatgttactcaggagcccgaagtagttttcaagtacattgaagctgccgctaaattgggtcaggtcaaggaaatagaaagggttaccagagaaaacaatgtctacaacggagaaaaagttaagaatttcttaaaagaggccaagttagatgatcagcttccactaattatcgtctgcgacagatatgattttgttcacgatttggttttgtatctgtacaaaaataagttctttaaatttattgaagtttatgttcaacaagtaaatccttctaaaactcctcaagtcattgctgggctgttggatgttgactgtgatgaggcaattatccaaagtttgcttcaaaccgttatcggacaagttccaatcgccccattagtcgaggaggtagaaaagagaaatagactaaagcttttgttaccatttttagagcaaacgctacaaggtggttcagcagataagactgtctatgacactctggctaagatttatatcgactccaacaacaatccagagaagttccttcaagacaatgacaactatgacacgttggtcgtcggtaaatactgtgagaaaagagatccttaccttgcttacatcgcatattccaagggtcaaaacgatgaggagttaatcaagattaccaatgagaatgctatgttcaaataccaagctcgttacttattgtcgcggtcagacaggcaattgtggtccgtagtactctccgaggacaacatgtacagaagacaattgatcgatcaagttgttggtacagccataccagagttggaagatccagaaccggtttctctagctgttgaggccttcatggacgccgatttgccatctgagttgatcgaattgttggagaagatcatcttagaaccctcgccttttaacgacaacccctcattgcaggaactccttatcttgactgctattaaggctgaccagactagagttgattcatacattgaaaaattggacgacttcgatcccgaggagattggatctctggcaactgaagcaggtttgtacgaagaggctttcaaggtttacaacaagtttgagctatatggaaaagcactcaaggttttggtagaggatgtcatgtcccttgatagaggtgaggaatacgccgaaaagttggataagcctgaactatggagtcagttgggtgctgcccagctaaacgggttgaggattccagaagctattgaatcttacataaaagctggagacccttccaattttgaacaagtaattgacattgctgaacatgctggtaaggaagaagagcttatacctttcctgaagatggctagagagactttgagagagcctaaggtcgacggtgctatcatcaatgcttacgctaacactgatcgtttgaatgatatagagcacttcctgcagttatcgaacgccgccgacctggagagcattggggacaagctctacgagaaacataattacgaggctgcaaagctactttattcatccatttctaattactcaaaacttgcttctactttagtgtatttaggtgactaccaggccgccgttgattgtgccagaaaggcatcaaacgtcaaagtttggaagcaagtcaatgaagcctgcattgacaacaaggagttcagattggcacaaatctgtggactgaacctcattattcatgcagaagagttggacgagctcgtcaacaagtatgagtactttggttacttcgaccaacttctttctttgtttgagaacggtcttggtctcgaaagagctcacatgggtatgttcacagaattggctgtcttatacactaaatattctcctgacaagaccatggagcacttgaagctgttttggtctagaatcaatatcccaaaggttcttcgtgcatgcgaggctgcccatctttggccagagcttatttttctttactgccactacgatgaatgggataacgcagcattgaccattattgagcgttccagttctgcttttgaacactcctccttcaaggaggttattgtcaaggtgagtaatcttgaaatctactacaaggccattaacttctacttgaacgaacatccaagcctgctgacagatcttttgtctgtgatgattccaagaatcgatctgcctcgtgtcgtgaagcttttccagaagtccgacaatttgccacttgtgaaaccattcttgatctctgtcttagacaagaacaactccattgtcaatcaagcctaccatgacttgctgattgaggaagaagactacaagtctttgcgcagtgttatcgagagtaacgataagtttgatgctctgggactggctgagagattggagaagcacgaggtcatctttttccgtcaaattgcagctgtgttgtaccgtaaaaacaagaaatggaataaggccatctcaattttaaagacagaccgattgtggtcagatgtgattgagaccgctgctatcagtggttccgaaaaggttgcaagtgagacgcttcagtattttgtcgaaaccggcaacaaagaatgtttcgtagctactttgtatgcttgttaccacctggtaaaccctgattctattctggaattatcttggcttcatggtctaggagattacaccaagccatatgaaatttcgattgccaagaataaccaagatcgaataaatgaactttataaggaccttaagaagagacagtcacaagaaactaatgcggatgatgaacaggctggttctcaaagactgttgttgaccaacggaactggaattggtttacagcctactggtaccggatttggaggtttctaa

SEQ ID NO: 3871 - DNA, 513 bp, Artificial Sequence
  Optimized genes for Pichia pastoris
atgtccagaaactttcaaacagttaaaagaggtgacagattcccaaccgatgctaccatgttccacattccatcttccggcggcggaccagctcctttcaacttaagggagactgttcaaggtaagagatttattgtggtggctgctccaggtgccttcaccagtacttgtcatgaagaacatttgcccccttacatcaagaaccttccaactttcttgaagaaaggtattgatttcatcctggtcatcaccgccaatgatgcatttgttttgaactcttggaagaaggctttgggtgctgattcagacaagattatttttgcctctgacactaatttggagcttgcaaacaagttgggacttacactagacctctcggttgctggtctgggtcaaagaactggacgtttcgccctgatcgtcggaaaagatggtgttgttcagaatgtatttgctgaaaagggtcctgaggtcaagcactcttcagcagaccgtgtcttagccaaattgtaa

SEQ ID NO: 3872 - DNA, 942 bp, Artificial Sequence
  Optimized genes for Pichia pastoris
atgcatagaacttattcattgagaaactctcgtgctccaactgcttctcagatcaacagtcctgctcctcctccgagcagtaccaagcagaatcgattttttggtaagggatccctttctaacactttaagaagacagaccgccggttctttcggtcctgagctatccaagaagcttgctcaactggtcaagatggaaaagaacgtcatgagagctattgaaagtagctcttacgagagaaaggctgttgccaagcaattgtcattgtggggtgccgaaaatgatgatgatgtgtcagatatcacagacaagttgggtgttttgatctacgaaattggtgagctggatgaccaattcattgacaggtatgatcaatacagaattaccttgaaaggtatcagagacattgagggctccgttcagccatccagagatcgtaaactgaagatcactgaccagattgcctacctgaaatacaaggatcctcaatctccaaagattgttgtcttagaacaagaactggtaagggcagaggctgagtctttggtcgccgaggcacagttatccaacatcaccagagagaagctaaaagcagccttcaactaccactttgactctacacgtgaacattctgagaaattggctttgattgctggttacggaaaagccttactcgagcttctcgacgactcaccagtcactccaggtgaaacgagaccagcttacgacggatatgaatcgtcgaaacaaatcattattgatgctgaaaacgcattggcctcttggactttggagggagctgctgtgcgtcccactctttccataagacacgttgagggggaatatgacgatgaggatgttgaaggacttaatgaagatacagacaacttgcacttgaccgaggaagaatggcaaaaggagcaacaagttcaaaatgcttaa

SEQ ID NO: 3873 - DNA, 1614 bp, Artificial Sequence
  Optimized genes for Pichia pastoris
atgtcatccaccgatatccagggtgatcaaggtgacaatgagaagatctacgccatcgagtctagtccctcaaatgaacagatcaaggatattcatgaagctcctgctgacaacaagtctgagttggatattcctgttaaaccaaagggatcttacattttggtcagcgtgctctgcctgctggttgctttcggtggtttcgtgttcggatgggacactggaactatctcgggctttgtcaacatgtctgacttcaccagaagatttggtcaattcaacggtgaaacgtactatttgtccaaggtccgtgtaggccttattgtgtcaattttcaatattggttgtgctatcggaggtgttactttgggtaagttgggagacatttggggtagaaagaaggccctaatgtttgtgatggttatttacatggtcgggatactaattcaaattgcttccattgataaatggtaccagtactttattggaagaatcattgccggtttggccgttggtgccgtatctgtcttaagtccaatgttcatttctgaaacttctccaaaacacatcagaggttcactcgtttcctgttaccaattgatgatcactgctggtattttcttgggttactgtaccacatatggtactaagacttacactgattctacccaatggagagtcccattgggcctttgctttgcttgggctattctgatgattgtcggaatgactttcatgccagagtcaccaagattccttgttgaggttaacagagttgacgaagccatgaagtcgattgctcgtgtcaataaggttagcattgacgatccgagcgtttacaacgaaatgagattgatatcggatggtattgagaaagaaaaggaggctggttccgtttcttggggtgagctgtttactggtaaacctaagattttttaccgtctactgatcggtatcttcatgcaatctttgcaacagctgaccggtaacaactacttcttctactacggtacaacaatattcaaggctgttggattggacgactctttccagacctccatcatccttggtgtcgttaatttcgcctcaacgtttttaggtatctataccatggataagttcgggcgaaggagaactctgttaggcggctctggagcgatggtggtatgtcttgtcatcttctccagtgtgggagtcaagtccttgtatgagaatggtaaagatgacccttctaaaccagcaggaaacgctatgattgttttcacttgtttgttcatctttttctttgcttgtacttgggcccctggtgtcttcgttgttgtgtcagaaacctatccattaagaattaggtccaaaggtatggccattgcacaaggatccaactggttgtggggatttttgatcgcattttttacaccttttatctctggtgcaatcgattttgcatatggatatgtttttatgggttgcacactttttgccttcttctttgtttatttctttgtacccgagaccaagggtcttagtttagaagacgttgatgaagtctacgagaacttgacctttggacgtgcttatgcttactctcacactattaaggacaaaggagctttgtaa

SEQ ID NO: 3874 - DNA, 408 bp, Artificial Sequence
  Optimized genes for Pichia pastoris
atgcaattctccattgttgctactcttgctttggccggatctgccctggcagcttactctaatgtcacttacacttatgagaccacgatcaccgatgtggtaactgaattgaccacctactgtccagagccaaccactttcgtccacaagaacaagactatcactgttactgctcctactacactaacaatcacagactgtccttgcaccatttccaaaacaaccaagattaccactgatgttccacccacgacccattcaactccacacactaccacaacccacgttccttcaacaagtactcctgctccaactcattcggtgtccactatttctcatggtggtgctgccaaagctggtgtcgcaggattagccggtgttgccgcagccgctgcttattttttgtaa

SEQ ID NO: 3875 - DNA, 792 bp, Artificial Sequence
  Optimized genes for Pichia pastoris
atgtctcaagctccagctagtgcccagcaaggttcggctcctcagggccaacgtcaattcggtggtgctcgtggaggtagacgaggcccaaagcgtggaccaagaagaggtgaagaagagaagggatggactcctgtaaccaagttgggaagattggtcaaagccggtaaaatcacttccattgaggagatttatttgcactccctgcccgtcaaggagttccagatcatcgaccatctccttcctgatttaaaagatgaagtcatgaagatcaagccagttcaaaagcagacatctgctggacaaagaaccagattcaaggctgttgttgtcattggtgactccaatggtcacgttggtttgggtattaagactgccaaggaagttgccaccgccattagagctgctattatcattgctaaactttcaattattccagtcagaaggggttactggggttccaacctgggagcacctcattctttggcttccaagacctccggcaaatgtggttctgtgttagtaaggatcataccggccccccgtggttcaggtatcgttgcatcaccagccgtgaagaagatgatgcaattagctggtgttgaagatgtttatacaagctctggtgggtcaacgagaactttggagaacaccctaaaagcagcatttattgccatcggtaacacttacggatttttgactccaactctttgggatgactacgagctgtctgaatctcctttggacgtgtatgctgatgaggcaagtgcttcttacagaaagagatactaa

SEQ ID NO: 3876 - DNA, 513 bp, Artificial Sequence
  Optimized genes for Pichia pastoris
atggttcaagttggtgacaagttcccaactgatgttgctctgacatatatcccatggactcctgaaaacagcggcgtgctagcatgtgccatccccattccttacgacctttccaagaaattacctggacgtaccgttgtcattgtttctgctccaggtgctttcaccccaacctgcacggccaaccacattccagtgttcattgagaagattgatgaattcaagaagaagggtgttgatgatgtcgttgttatcactactgacactccgtttgctaacgcagcttggggtaaggctttgggagccaaagacgaaattatatttgccaatgatccattggctgctctcagtaaagagctgggctacttgaaatctgaggtccctgcttcctttggtatcagaggtgccagatatgctgtcgtagtcaaggatggtgtcgtctcatacttcggtgttgaaacctcttcgggagtaacagtgtcaggagctgacgccgttttggaggcattgtaa

SEQ ID NO: 3877 - DNA, 972 bp, Artificial Sequence
  Optimized genes for Pichia pastoris
atgactttgactatcaacccatctctgaagaacgttttagaaaatcaaaagggtggtgctcctgtcgagaatgacttgaaggctttgagaaagcatgctgacaagattgaagaacactactacaaggaagttatcacgaaaccatcagatgttgctggtatgcaattcaccattacagcacatgacggtgaccagatcgaatgtcgtttctactccaaggatgctgatcctaaccaagtcagaacctcgaaacttccctgcatcattcactttcacggagggggatacatcaccggagatgtcagccgttacagtcatttgacctcacaatacgtttctgcaactggtgttcctgtattaagtgtggactacagactcgccccagagtacccagctccaattcctcaggaagatggattctctgctctacagtatctgtatgagcactgtgacaacttgatgattgacccaaacaaaattattctgatgggtgattcatctggtgccggcctagcactgtccgtagctgcccttgctgctgagagaggtatccccattgccaagcaaattcttatatatcctatgttggattctaacaacactgaggaacctgactctgaggatttaaaggagaagaagccatacttaacctggacccatagaatgaacaagttggcctttgactccttgctttctgaaaaagaggagtatgaaccgtccctgttcccattcaacgaccctaatgtcgactggtccaaatttccaaagacttacttggaaactgtcacagttgatatcttgaacgatgatggtagacaattgcacaggaatcttacagagaacaatgttcaagttgagttccacgaatgggaaggtttgtgtcatggatttgagccacttttgtggactgaagagaatgatttgctccagaacattttggagaaacgatatcaggccatcctggacgtgtaa

SEQ ID NO: 3878 - DNA, 735 bp, Artificial Sequence
  Optimized genes for Pichia pastoris
atgccacagaagactacatccaagtatttattgatgattccaattttcaaccgtttggctttcggtcaatgttgccgttttgtcaaccatttgtcagggctcaaactggacgaggagaagaaagccatcatctctgagagaactgccaaatattatgaagagtacgaagaagcagccagagttttggagaaagctaagtctgatgctgcagcatccggatcttactttgttgaagccgagcctaacttggtgctagtggtccgtatcaagggtatcaacaagattgctcctaaaccaagaaaagttttacagctactccgactgcttcaaattaatgctgctgtttttgtaaggatcaccaaggctactgctgagctgttacgtcttgtagagccatacgttgcttatggttacccttctttggaaaccgtcagagaacttatctacaagagaggatacggtaagttgaacaaacaaagagtcccattgaccgacaatgatatcattgaaaaggttctgggccagtatggaataattagtattgaggacttgattcatgaaatttacactgttggccccaatttcaagcaagccaacaactttttgtacccattcagattgagcaatcctgatggtggatggggtgttagaagaaagttcttccactacattcaaggtggtgccacaggtaacagagaggaacacatcaattcacttgtcaagaagatgaactaa

SEQ ID NO: 3879 - DNA, 444 bp, Artificial Sequence
  Optimized genes for Pichia pastoris
atgtctttatcgacattcaatgccgaagaggctgaaaatctcgacgacattgagaaacagtttgccgtcaaggctgttacccaagctgagacttactggaacctgttaacaaaaatcccaggtaccaagttgaaactaactccttatgatgatgaaatctttgaagctttgttgaaggatttcccagagtttgagaaccctgaatacgcatcaaagatcaatgaagatgagatgaaatcccttagtggaaaggaaagatggagaaagttcatgaagccattcgaggagaagattgatgacttcaactttggaacccttctgcgtactgactcttccaaggagtatgaccaagaaggtactatctttgttgtgcgattgcaattctacgctattgaaattgccagaaacaagtacggtttgaacgactggatttctcagaaataa

SEQ ID NO: 3880 - DNA, 1488 bp, Artificial Sequence
  Optimized genes for Pichia pastoris
atggaacagcctcaagctatggagaaagttgaatcggttgacgttactgaggctaacgctgtcgccgccggtactaacaagctcacaaagagaattgttgccgctggtttgggtggtaagttgatgggtaccaagtctatggttgatgttacggccgatcagcttgccaaggacagtatcaacgagcttctggcgcgtgacaaagctctaaaggaaaagtacgaaaaacaaaagcatatttccgaacaaccatggaccaaagacaactggcatcaacacattaactggttgaacatgattttggtttgcggcctgccactgtttggtgccatagcaacctattataaacctcctaccaaagaaacagtgatattgggagtggtgctttatattctaggaggactaagcatcactgcaggttaccacagattgtggtcacaccgtgcttactccgcccgtactccactcaaggttttgtttgctttattcggtgctggagcagtagaaggttctatcaagtggtggtctcatagtcatagggtccaccatcgttatacagacactcaccgagatccatatgacgccagaaagggtttctggtactctcacatgggatggatgttgactaaaccaaaccccagatacaaggctagagctgacatctccgacctggctgatgactggatcgtcagattccagcacagacactacttgttgatcatgactttcatggctttgattctccccaccatcattgctaagtatttttgggacgatgcttggggtgggttcatttacggtggaattttcaaggtctttgtcattcaacaagcaacgttctgtgttaactcgttagcacactggattggtgttcaacctttcgatgatagaagaaccccaagagaccactttttaacagctatcgtgaccttcggagagggctatcacaattttcatcatgagtttccgtcagattacagaaacgccttaaaatggtaccaatacgatcctactaagattgtcatctaccttagttcaaaagtcggtctttcttacaacttgaagactttctccgataatgccattaagcaaggtttagtgcagcagcaacagaagaagttagactccatgagggcccacttgaattggggaactcctctgcaggatttgccagtttgggataaatctgagttctttgagaagtccaaggacaagaagggccttgtaatcatctctggtattgtacataatgttgagaactttattggagaacatccaggtggtgagaagctggtcaagggagctctgggaaaagatgccaccactgctttcaacggtggtgtctacgctcattcaaatgcagctcacaaccttttggctaccatgagagttgctgttatcagagatggtaatgctaatgccaacactttttctttgcaaaatgaattcttggacaagaaagcagccgcagctgctgcttctaactaa

SEQ ID NO: 3881 - DNA, 1626 bp, Artificial Sequence
  Optimized genes for Pichia pastoris
atgtctgagaagtactcgcgcccagctcaaccacctcccacttacaatcagccaggaggtggtcaatctcctttcaatgagccatactatcctcagcagggtgtcaactcctccgattaccaccaacagcaaagacctgattatgaccccgaatctcaattccctcctgaaaagattgtcggatcaggtaagccagacaatgctgagacctttgacgattcattcaaggtcaagaacaagttgaatgactggccatttacaatattgttcattgccacccttgctggtttcgttgttgtagccggtatcgtcctgagtgcttgggcttctaactactccacaagtggctccggtatctacgactctggagcttcatttacgctcaataccaacactgttgtgttatttgcctttgtgatcgttatcagtctagtattggctgttttgatgttgtgtttcgcacgtatcgccccaaagagatttattcaggttggaattgtgttgaacgttgtcttgggtttggcctcttccatttattatcttgcagttggttattactcagctggtgttgtgtttttggtgttcaccctcatatcggcctactgttactggtccatgagaggtagaattccattctccgctaccgttttgactatcgtgattgacgttatgaagagaaacccttctacgctgatgacttctctgatcggaatcattgtttctggtgccttcgccgcactgtttagcgcgactgtagttgccacttatatgaaatggactccgtcagatgagaacggaaactgttcctttaatgaaggaagcacatcatgctccagatccaaggttatcggtattctagtatttgttttctttgccggatactacatcaccgaggttattggtaacgtcatccacgttaccatctccggcgtctatggatcttggtactaccttagccgatctgaccaaggtatgccaagattcccagcacttggggctttcaaaagggccatgacctggtctttcgggtctatctgttttggttctcttattgttgcactgttgcaattgctgaaaacaattattcaaatcttgaagaatgatgctatgcaaaacggtgaaggttggcaaactattatcctttgctgtgctgattgtattttgggcttaattgaatgggccgtcagatacttcaaccattatgcttacagtttcgtagcactctatggtgagtcatacatgaagtctgccagagctacttgggatctgttcagagccaaaggattggatgcattagttaacgactgtttaataggtgctggattatcttttttcgctctatttgtctcatatctgtctgctcttttctcttatttgtacttgcgttacactgctcctggttacaactctgatggttccttctacgctccagtcattgcatttaccttcgtcattgctttgcagattgtcaatattgcttcctctgtgattcgtagtggcactgcaactttcttcgtttgcttagctagagatccagaggtcttccaaatttcttaccctgacgaattttctcgtatctttgctgactatccccaagtcatgaacaaagttgctgctaggcagtaa

SEQ ID NO: 3882 - DNA, 447 bp, Artificial Sequence
  Optimized genes for Pichia pastoris
atgcagttcaaatccttaattggtgccactttggccctatccgttgtcaaggctactactgaacttgagccaattttcaccaacgatgtcaacgtcactgtgcccactgttcctccagagatcacttctactcctgacgtgagtgttccaggtaatctgacagaaactggaggtttgaccaacaccactggcaccggtggtttcactaacactactgctaccggtaccggtggatttaccaataccaccgcaactgggacgggtacagggacaggtactggaacgggaactggtaccggtacaggaaccggaactggaaccggcacaggtacgggtaccggaactggtaccacaggaacaggcactgagactggtaacggtgctcaagctgttttgggttcttcagtacttgcagctgctggtctgtttgttgccatgttgatctaa

SEQ ID NO: 3883 - DNA, 405 bp, Artificial Sequence
  Optimized genes for Pichia pastoris
atgtctaccgagaatcaagaaatcaaagagcagattgatgctaccaaccaggagattgtcaacaacgctcaagaggctgctgagccagccaccgaagccgttgctgaatcgtcaactcaagctgaggccactggtgaagtaacgagtgaacatgctaagtctctgaaagagaaaacagaggagtttttggaccactccaagaaggaagtggagcacgcatttgagactgccaaagaaaaggctgatgaacttgtcaagggtgccaaggcaaaaaagactgaagctgccgagtccaatgctgaaacttctgaagcagcaacagaatctgctgacaaggttgaagagaagggaatcaagaagtacttcaccaagttcaagaacgtcattaagaaagttgccaactaa

SEQ ID NO: 3884 - DNA, 1005 bp, Artificial Sequence
  Optimized genes for Pichia pastoris
atgttgtcaaccattgccaagagacaattctcctcttctgcatctactgcttacaaggtagcggtactgggcgccgcaggaggtattggtcagcctctcagtttattgatgaagttgaaccacaaggttacagaccttgccttatacgacatcagattggctccaggagtggcagctgacgtttctcatattccaactaacagtaccgtgactggttacactcctgaagacaacggtctggaaaagaccctaactggagctgatctagtgatcatcccagctggcgtcccaagaaagccaggtatgaccagagacgatttgttcaacaccaatgcttctattgttcgtgatcttgcaaaagctgttggtgactattccccatctgccgctgtcgccatcatttcaaatcctgttaattcgactgtccctatagttgctgaggttttgaaatctaagggagtttacaacccaaagaagctgtttggtgttactacattggatgtcttgcgtgcctccagattcttatcgcaggtccaaggtaccaacccggcatcagagcctgtaactgttgtcggtggccactccggtgtcaccatcgtccccctactgtctcaatccaagcataaagacttacctaaagatacctatgatgctttggttcacagaatccaatttggaggagacgaagtggtaaaggctaaggacggtgctggatccgctactctttcaatggctcaagctggtgccaggtttgcctcatccgtgctgaatggtttggccggtgagaatgatgttgttgagccaagtttcgttgatagcccccttttcaaggatgagggtatcgaatttttctctagcaaagtcactttgggaccagaaggtgtcaagactattcatggacttggtgaattgtctgctgccgaggaagaaatgattacgacagccaaggagacactcgcaaagaacattgctaaaggtcaagagtttgttaaacagaacccttaa

SEQ ID NO: 3885 - DNA, 1341 bp, Artificial Sequence
  Optimized genes for Pichia pastoris
atgtctgataatgccaatgaaacttcatcatcgctattggacaatgtctatcttgactcctctgaccttctgattgcccgttatgacaaatggattttggctcttgctttctttgaaaacttcttcgccagatacgatagtatactttccagtacagccaaggactacggtaaattagtgaaacatttctccactgacactttgcctcaatttgaggtcagcccctcttccaatattgctggtgccgtttatggatctgtcaattctgaagcggacccgaataagaatgtaactggtgttaactcttttattgagttgctgaaattcagatcctccgaagaccaaggtaagattgcaggccttgaaacatctatcagagagcaaattattccagagttcaaaaaatattcggccgatttaagcgcaaagaagaaggatctcacagcagatgcatccaaacagaggaaggaactgaagaaattgggtttgcacttgtcaagttcaatctcaaagttgcaacattctacccaggtatttgagtctgcctctggaaccggtaagatggattacaagaacgatccttacatgttgaagagagctgtttccttacacggtacagagctgatcgccaaagagcacaaccacatggactttctcaaacgtgaagaactttcgctgatgacccttgagaagagaaccctagaattcattcaattgatttttgctgatgttagcaacagaatcactgctgctgactctgttttctctcgttcctttgacagtctgtctaagaccctatcgtcaattgacttggagtacgaatggaagcaattcagtgaagttaacaagcagcgattagttactgttgaaggaaatgatgatatctctggtgctaacatttctgctgataacaagaagcgtgggctctcagatttgtctttcccaaatgaccatcatccagctaccgagccaattctggaaggtatcttgcagagaaaggagggaaaggtcaacaaaaagtacgtttctgagtattacgtcattaccaagactagatatttatacgagtttgaatccaacgctccaaagaactcaacacagccaaacactgtgttgtaccttcctgaatgtactttaaagtctttgaacggtcctgacaactccaagttcaagatcgagatcagcggcaaagatgctactcaagctttttcagtcatcaagtccacgctgatattgaaaacctctacttacgacgaaatgagaacttggttcaacgttttgtccgaggtgagtggattgatgcaaacccaagaggagtccagattggattctcctaactaa

SEQ ID NO: 3886 - DNA, 1515 bp, Artificial Sequence
  Optimized genes for Pichia pastoris
atgactgatacaaaagccgttgagttcgtcggccatacagccattgttgtgtttggagcttctggtgatcttgccaagaaaaaaactttccctgcactctttggcttatacagagaaggatacctgtctaataaggtaaagatcattggttatgcaaggtcaaagttggatgacaaggaatttaaggatcgcatcgtaggctatttcaagaccaagaacaagggagatgaagacaaggtccaggaattcttaaaactatgttcttatattagtgcaccttacgacaaaccagacggttacgaaaagctgaacgaaactatcaacgagtttgagaaggaaaacaacgttgaacaatcccacagattgttttatcttgcacttcccccgtcagtgttcattccagtcgcgacagaagttaagaagtatgttcatccaggttccaaaggtattgctagaattattgtggagaaacctttcggtcacgatctgcagtctgctgaagaattactgaatgccttgaaacccatctggaaagaagaggaattgttccgtattgatcattatttgggaaaggagatggtgaagaatttattagctttcagattcggtaacgccttcatcaacgctagttgggacaacagacatatatcctgcattcagatctcattcaaagagccatttggtactgaagggaggggtggttactttgactcgataggaattatcagagacgtcatccaaaaccatttgctacaggtgttgactttgctgaccatggaaagacctgtatccaatgacccagaagctgtacgagatgagaaagttagaatcttgaagtctatttctgagttggacctaaatgatgttcttgttggtcagtatggaaaatcggaagatggtaagaagcccgcttacgttgacgatgagactgtcaagcctggtagcaagtgtgttacatttgctgctattggattgcacattaacactgagagatgggaaggtgttccaatcatccttcgtgctggtaaggctttgaatgagggtaaagtcgagatcagagtccaatataagcaatctacgggatttttgaacgacattcaaagaaatgaactggtcattcgtgttcaaccaaacgaggccatgtacatgaaattaaactccaaggttcctggagtttctcaaaagactaccgtcaccgagcttgatttgacctacaaggacagatacgagaacttctacattcctgaggcttatgagtccttgatccgtgatgctatgaagggtgaccacagcaattttgttcgtgacgacgagctgatccagtcttggaagattttcacccctctgttgtaccacttggagggacctgatgccccagctccagagatttacccatacggttcaagaggtccagccagtctcactaagttcttgcaagatcacgactacttctttgaatccagagataactaccaatggccagttaccagaccagatgtccttcacaagatgtaa

SEQ ID NO: 3887 - DNA, 1083 bp, Artificial Sequence
  Optimized genes for Pichia pastoris
atgtctgtgatgaaggcccttgtctacggtggtaagaatgtgtttgcttggaaaaacttcccaaagccaaccatcctccacccaactgacgtcattgtcaagactgtggccaccactatctgtggtactgatcttcacattttgaagggtgatgttccagaagtcaaacctgaaaccgttcttggccatgaggcaattggtgttgttgaatctataggggacaacgtgaaaaatttctccatcggcgacaaggttctggtttcttgtatcaccagttgcggttcatgttactactgtaagagaaacttgcagtctcattgcaagacaggaggatggaagttgggtcacgatctcaatggaacccaagctgagtttgttcgtattccatatggtgacttctcattgcacagaattcctcacgaggctgatgagaaagctgtcttgatgctttccgatatccttcccactgcctatgaagttggcgttttggctggtaacgtccaaaagggagattctgttgctatagtaggtgccggtccagtcggtttagctgccttactgacagttaaagcatttgaaccttccgagattatcatgattgacactaacgatgaaaggctgagcgcatccctgaagctgggtgcaacaaaggcagtaaatccgacaaaagtgagttcggtgaaagatgctgtttacgacattgttaacgctactgtccgtgttaaggaaaacgacttggagccaggagttgacgttgccattgaatgtgttggtgtccctgacacctttgccacttgtgaggagatcattgccccaggtggaagaatcgccaacgttggagttcatggaactaaggtcgatttacaattgcaagatttgtggatcaagaacattgctatcactactggtttggtagcgacatattctaccaaggatctactaaaaagagtctctgacaaatctttggatcctacgcccttagtcactcatgaattcaagttttctgagttcgagaaggcttacgaaacttcacagaatgctgctaccaccaaggctattaagattttcttgtccgctgactaa

SEQ ID NO: 3888 - DNA, 2475 bp, Artificial Sequence
  Optimized genes for Pichia pastoris
atgctgaaagccagaactgtcaaacctaaccagctcaggttgaacgctcttagggctaaggttccaagaattctgttggcttcttctctttcaactttgtccctgagaaccagttctaatacgttagctgtcagacctgtgcaaccaaagatcccattcgctagacataacgtcaaccacttgagactcagaactccaatgtccattcgttttgctagttctggtggtcctcagataaacatgaacggtcaacaggaggaggagttaccagctttgcagaagtacggtgtgaacctaactcaactagccaaggacggtaaattggacccagttattggacgtgatgaagaaattcgacgaactattcaaattttgagccgcaggacaaagaacaaccctgccctcatcggtaatgctggaactggtaagactgctatcatggaagggttagcccaacgtattatcaagggtgaggtacctgagtctatgaaagataaggaagttgtcgcactagatttagggtcactgatttcgggcgccaagttcagaggtgaatttgaagagagattgaaggctgtactcaaggagcttgacgaggctcatggtaacattattttgttcattgatgagttgcacatcttgcttggtttgggtaaggcagagggttccatcgatgcttccaaccttcttaaaccggcactagcgagaggacaattgcaatgttgtggtgccaccaccattgaagagtacagaaagtatatagaaaaggatgctgctctggcaagaagattccaaagtgtcttggttaacgagccatctgtccaagacgctatttcaattcttcgtggattgaaagagaaatacgaaatccatcacggtgtcagaatcaccgactctgctttagtcaccgctgcagtgtatagcaatagatacatcactgaccgtttcttgcccgataaagcaattgacttggtcgatgaagcatgctcagctttgaggcttcagcacgagtccaaaccagatgttatccagcaactggatagacaaatcatgacaattcaaattgagctagaatcccttagaaaagagaccgatccaatctcggttgaaagaagagacaagttggatgaacagttgaagctgaagaaggaggagctggaacgtttgacccaagtttgggaagacgagaagaattccttggagaagataaagaccgcaaaggaagaattggagcaatctaagcttgaacttgagcgtgcccagagagaaggagattttggaaaggcctcaatgttgagatattcgaagattccagagttggaacaaaaagtttccgccacagctcaaagagtcaaggagggagaaagtgaaacaaccactaatttgttgcatgaatcagtcacttcagatgatatcgcttgggttgtatccaagatgaccggtgttcctgttcaaagcttgatgaagggagagaaggacaaattattgtacatggaggaatctatcaagtctcgtgtaattggccaagatgaggccattcattctgttgctgacgccgttcgactacagagagctggtctgaccaatgaaaagagaccaattgcctctttcatgtttttgggaccaacgggtactggcaaaactgagctgaccaagtcattggccgagtttcttttcaatgatgagaacgccgtcgttagatttgatatgtctgagtttcaagagagacactctctgtccagattgattggtgctccaccgagttatgtgggatttgaggaaggtggcgagttaacggaagccgtgcgtcggaagccttacgctgttgttttgtttgacgagttcgagaaggctcacagagatatttctaaactgatgcttcagattctagacgaaggcaatctgacagactcccaaggtcacaagatcgacttcaagaacactatcatcattatgacttctaacttgggtcaggatttactccttgccgacactgaactggagaatgttggtggaaaagtgtccgaaaagacaaaaaatgaggtcattcaggttatgaagcagaactaccctcctgaattcatcaacagacttgatgacgttctggttttcaacagactttcgagagagtcattaagaaagattgttgacatccgtttatccgaggttcaggacagactggtggatcgtcgtatcgaattaaagttgactgatgccgctaaagaatggttgacagaaaaaggttacgaccccctatatggagctcgccccctcaatcgtgtcatcaaaaagcaattgttaaacccattgtctattagattgatccaaggagagattaccaacaattctactgtgaaggtcgacttagtagacggtgatctgcaaataacctctgaaaaaaacgaagctgaggcagaaactgttaggaaggaagatggtgacgaacctgctgaatacgagatcattaaagactaa

SEQ ID NO: 3889 - DNA, 360 bp, Artificial Sequence
  Optimized genes for Pichia pastoris
atgcctaaaaaaagagcttccaatggaagaaacaagaaaggtagaggtcatgtcaagttcgtgcgatgcttaaattgtgccagatgtgttccaaaggacaaggccatcaagagagttactattcgtaacatggttgaggccgctgctgttagagacttgtctgaagcttctgtttacgaagagtatgcactgcctaagctttacaacaaattgcactactgtgtgtcatgtgctattcacaccagaattgtccgtgtaaggtctcgtagtgatagaagaatcagagcacccccacagagacaaagattttccaacgatcgtagggtcaacccagctgaggctgccaagaaggctttgtaa

SEQ ID NO: 3890 - DNA, 366 bp, Artificial Sequence
  Optimized genes for Pichia pastoris
atgtttagaactgctgcttcttccattggtcgtcgtggtttcactacagtaaaaggagatcctgccaaagcacaggccttcaagaaacacttggatgatgtttatcatcactccaagggaaccaccgccttgtggaagaagatctcttactttgttgctcttccagccattgctctgaccgcagtcaacacttacttcgttgaggctgaacatgctgagcacagagctcacaacagacatttgtcagacgaagaatggccaaaggcttatccataccaaaatgtcagaagagttgacttcttttggggtgatggtgacaagactttattctggaaccctgacgtcaataggcatgtgaaggagtaa

SEQ ID NO: 3891 - DNA, 597 bp, Artificial Sequence
  Optimized genes for Pichia pastoris
atgggtctgttggacttggaacaacaattggccttctacagagcttaccacttcaacaaggtcaatgtcgctattcatttggttttcgttcctactatcctgttttcaacggttggtttcttgtctgccattccattgaaccaaataactccatttgatctgtctggtgttccattctttggtaagttgtacaacttgggcgcatttttgattgcttcattctccatttactacatcttacttgacagactgggactggtattaacacccctgctattacttatttcttattccatctcgaccctttatgatttttatgacaagtctgaggttgtcaaaggaagtttagtgctcttcggtatcggatgggccgttcaattcgtcggtcatgccctatttgagcgtagagcccctgctttgtttgacaatttggtgcaggcactcgtacttgctccttactttgttgctttcgaagttgtgtttgctcttggattcagaaaggatttgcagaagaagatgaacaaccacgctggtaaattgatgttggagttccgtaccagggaaaaaggtcacccagtcgttgagaagactgattaa

SEQ ID NO: 3892 - DNA, 636 bp, Artificial Sequence
  Optimized genes for Pichia pastoris
atgtctttcagtgacttctcaaaggtcgagaccatttccgagttgaatgatctgttggctgacaagtcttacattgatggaacttcacccacacaaattgacgttgtcgtctataaagcgttccaaaagcaagctccaaactttgccagatggttcaaccatattgcttcttttacagacgaatttgacactttgccagagggaaatgctcctgcagctgctgttgctgctgaacttgccgaagaagaggaagatgttgacttttttggtagcgatgatgaggaggaagatgaggctgctgagaagctgaagcaggagcgtctagcagcctacgccgccaagaaggcagcaaagggaccaggtcctgctgccaaatctctggtcacccttgatgtgaaaccatgggacgatgaaaccaacatgcaagacttgttggacaatgtcaaggctatcaaatgggatggcttagtatggggtgcccacactttcgtgcctgtgggtttcggtatcaagaaacttcagatcaacttggttgttgaggatgaaaaggtttcgttagctgatttgcaacaattgattgaagaagacgaggaccacgttcagtccactgatatcgccgctatgtccaagttgtaa

SEQ ID NO: 3893 - DNA, 399 bp, Artificial Sequence
  Optimized genes for Pichia pastoris
atggctcccaaagccgaaaaaaagccagcttccaaggctcctgctgagaagaaaccaactgccggaaagaagacatcaagttcatcagagccaaagaagagatctaaagttagaaaggaatcttatgcatcctatatctacaaggttctgaaacagacacatcctgacactggtatctctcaaaaggccatgtctatcatgaactcatttgtcaatgatattttcgagagaattgccagtgaggcaagcaagttggcttcttacaacaagaagtccaccatttctgcccgtgagattcaaactgctgtcagattgatattaccaggtgaactttcgaaacacgctgtttctgaaggtaccagggcagtgaccaagtacacttcctccactcaagcttaa

SEQ ID NO: 3894 - DNA, 393 bp, Artificial Sequence
  Optimized genes for Pichia pastoris
atgtctggaggcaagggaaaagcatcgagtgctgaaaaggcatcaacaagccgttcatccaaggctggtttgaccttcccagttggtcgtgtccacagattgctgagaagaggtaactacgcccagagaattggttccggtgctcctgtttacttgactgccgtgttagaatatctagctgctgagatcttggagctggcaggaaatgctgccagagacaacaaaaaatccagaatcattccaagacatttgcaattggccatcaggaatgatgaagagttgaacaagttactcgggcacgtcactattgctcaaggtggtgttcttcctaacattcaatctgagcttctgccaaagaagtctgctaaggccaaggcttctcaggaattgtaa

SEQ ID NO: 3895 - DNA, 1002 bp, Artificial Sequence
  Optimized genes for Pichia pastoris
atggctattacagttggaatcaacggatttggaagaattggtcgattagtactaagagttgctttatctcgtgctgatatcaaagttgtagccatcaatgatccattcattgctccagaatatgctgcttacatgtttaaatatgattctacccataaagcctacaagggtgaagtttcagccagtggtaacaagattaacattgatggcaatgaaatcaccgtgtttcaagagagagaccctgtcaatataccatggggtaaggctggtgtcgactacgttattgagagtactggtgttttcactactttggagggtgctcaaaagcacattgacgccggtgccaagaaagtggtgataaccgctccttccaaggatgccccaatgttcgttgtcggagttaacgaagagaagtacacttctgacttgaacattgtttccaacgcttcttgcaccaccaactgtttggctccgctagcaaaggttgtgaatgacacttttggtatcgagtctggtttgatgaccactgttcactccatgactgctacccagaagaccgttgacggtccatctcacaaggactggagaggtggtagaactgcatcaggaaacatcattcctagttcaacgggagcagctaaggccgttggtaaagtcattccagagctgaatggcaaattaacaggcctggctttcagagtccccacggtcgatgtttctgtggttgatcttacagtcaacttgaagaaggaaacaacttacgaggagatcaagtccgtcatcaaggctgcctctgaaggaaaactgaagggagtactcggatataccgaagatgctgtcgtctcgtcagatttcttgggtgatgaaaggtcgtccatttttgacgcaagcgcaggtattcaattgactccttctttcgtcaagttgatctcttggtacgacaacgagtatggttactccactcgtgtagtggaccttcttcagcatgttgccaaagcttaa

SEQ ID NO: 3896 - DNA, 1245 bp, Artificial Sequence
  Optimized genes for Pichia pastoris
atgaacttatacttgatcaccctattatttgcttctttgtgttctgctattacacttccaaagagagatattatttgggactactcctccgaaaaaataatgggtgtcaacttgggtggatggttagttttggagccatacattacccccagcctgttcgaggcctttggtgatgacgttccagttgatgaatacagatacactgaacgtctgggaaagtccctagccctcgaccgtttgcaacagcactggtctactttctacgacgagaaggacttccaagatatcgcggcatatgggctgaacttcgtcagaattccaattggttattgggccttccagcttctcgatgatgatccttacgtccaaggtcaagaggagtacctagacaaggctttggaatggtccagaaaacatggtttgaaagtttggattgacttgcatggagctccaggttcgcagaatggctttgataactccggtaaaagagactcttgggactttcagaacggtaataacgttcaagttactcttgatgtcttgaagtatatttccaagaagtacggtaccacagattattatgacgtcgtcatcggtattcaattgttgaatgaacccttaggccctattcttgacatggacaatctgagacaattctatgctgatggatacgatttggtaagggatgttggtaacaactttgttgttatccacgatgctttttaccaagccccggaatactggggtgacgattttacttcggctgaaggttactggaacgtggtgctggatcatcatcactaccaggtgtttgacgccgatgagctgcaaagatctatcgacgaacacattgaagctgcttgtgactggggaagagatgccaacaaggaatatcattggaatctttgcggtgaatggtcagcagcattgaccgattgtactccatggttgaacggagtcggcaagggtactcgttacgagggacaactggacaactctccttggatcggatcatgcgagaattctcaggacccatcaaagttgagtagtgagagaatctgtgagtaccgtaggtatgttgaggctcaattagacgctttcttgcacggtaagtctgccggatttatcttctggtgtttcaaaacggaagcatcacttgagtgggatttcaagcgattagtaaatgctggtatcatgccacagcctttggacgacagacagtatcctaaccaatgtggtttctaa

SEQ ID NO: 3897 - DNA, 1053 bp, Artificial Sequence
  Optimized genes for Pichia pastoris
atgtctccaactatccccaccacccaaaaggctgtcatttttgaaacaaacggcggaccattggagtacaaagatattccagttccaaaaccaaagtccaacgaacttttgatcaatgtgaaatactcaggagtctgccatactgacttgcacgcttggaagggagactggcctttggacaacaagctaccgttagtgggcggtcacgagggagctggtgtcgttgtcgcttacggtgaaaatgtcacaggatgggaaattggagattatgccggtatcaaatggttgaatggatcttgtttgaactgtgagtattgtattcaaggtgccgaatcgtcatgcgcaaaggctgatctatccggtttcactcatgacggtagtttccagcaatacgccactgccgatgctactcaagctgctagaattcctaaggaggctgatcttgccgaggttgccccaattttgtgtgctggaatcactgtttacaaggccctcaagactgctgacctgcgtataggtcaatgggttgctatttccggcgcaggaggaggcttaggttcccttgcggtacagtacgctaaggcactggggctgagggtgcttggtattgacggaggtgccgacaagggtgagtttgtcaagtctttgggagcagaagtttttgttgacttcaccaagacaaaggatgtggtagccgaggtccagaagttgaccaacggtggtcctcacggtgttatcaacgtttcagtttctcctcatgctataaatcaatctgttcaatatgttcgtacgttgggtaaggtcgtactggttggtcttccatcgggggcagtggtcaacagtgatgttttctggcacgttttgaaatccattgagattaaaggttcttacgtcggtaacagagaggactctgctgaagccattgatttatttaccagaggtttagtcaaagctcctatcaagatcattggtctgtctgagttggccaaggtttatgaacagatggaagctggtgcaatcatcggtagatacgttgttgataccagcaaataa

SEQ ID NO: 3898 - DNA, 435 bp, Artificial Sequence
  Optimized genes for Pichia pastoris
atggcttccaaaactgagaatgttacccttggaccacaggtcagagacggctcccaagttttcggtgttgccagaatctttgcttcattcaacgatacatttgttcacgtcactgacttgtccggtaaggagaccattgcacgtgtgactggtggtatgaaggtcaaggctgacagagatgagtcttctccatacgctgctatgttggctgcccaagatgttgcagccaaatgtaaggaagttggtatcactgctgttcatgtcaaattacgtgccactggaggaacaagtaccaagactccaggtcctggcggtcaatctgctctgagagctttggccaggtcgggactacgaattggtagaattgaagatgtgacgcccgtaccttcagactctaccagaagaaagggtggaagaagaggtcgtaggcgttaa

SEQ ID NO: 3899 - DNA, 156 bp, Artificial Sequence
  Optimized genes for Pichia pastoris
atgccatctttgaagactttcaagacaaaacaaaagctgggtaaggctcaaaaacagaataggccacttcctcaatgggttagattgagaaccaacaacaagaacagatacaatgccaagagaagacactggaagcgtactaaattaggaatttaa

SEQ ID NO: 3900 - DNA, 387 bp, Artificial Sequence
  Optimized genes for Pichia pastoris
atgcaaatcttcgtcaagaccctaactggaaagactatcactttggaggttgagtcttcggataccattgacaatgtgaaatctaagattcaagataaagaaggtatccctcctgatcaacaaagattgatctttgctggtaagcaattggaagatggaagaactttaagcgactacaacattcagaaggaatcaacactgcatttggttttgcgacttcgtggcggtattattgagcccagtctcaaggttcttgcctccaagtacaattgtgacaagtctgtctgcagaaagtgttatgcaaggttaccaccaagagctaccaactgtcgtaagagaaaatgtggtcactccaaccagctgagaccaaagaagaaattgaaataa

SEQ ID NO: 3901 - DNA, 1647 bp, Artificial Sequence
  Optimized genes for Pichia pastoris
atgtccaaggagtctggaaaggtgctacaggttaactactctgattctgagacctcaaacggtgaggatcaatatgtccacaagatcaagccagttgaggacgaagatgatacttccatgatgatgtcttttgataaccataaaccaactatcactattatcatcttgacagtgatggcttctttctctgggttcatgtttggttttgacactggttacatcagcagtgcacttgtttccattggcactgacttggataataaagtgcttacctatggtgaaaaagagttgatcacatctgccacttcattaggtgctttgttgtctgctatatcagctggtctgttggctgacatcattggaagaaagcccgtaattatgggatcaaatcttctgtttgtggtgggctcggtgattcaatgtgctgctaacaccgtttggactatgatcggaggtagatttgtcatgggtttcggtgttggtattggttctttgattgctcctttgtacattggagaaatggccccatctcgttttagaggtcgtctcgtcatcatcaacgttattgcaataactggtggtcaattggtcgcctacgctattggtgccggtttgacccacgttcataatggatggagaatcctggtaggactttcgattattcctcctgtcattcagctctttgttttcttttttttgcctgagactccaagattcttgatcatgaccaacaagttggagaaggccgccaaagttataggtaagacccataatgagtccgacgaggagttaatccaaaccaagattctggaaattcagtcagcgaatgctatcattccaggttcgaacccattccagaagacttggaacgccatcaaagaaatccatcgtgtcccttccaacttcagagctctggtcattggttgcggattgcaaggtatccagcaattcactggatttaatagtttgatgtactttagtgctactgtttttgagacaattggtttcaagaactctaccgcagtgagcctgattgtagcaggcaccaatttcattttcacctctatcgcatttttcgttatcgacagagtcggtcgcaggagaattctacttataggtgtcacgggaatgattctctcattggttatgtgtgccgttgctttccacttcctggatatccacttttcaggtcacaatgcaattgtcgaaacaaatggaatcagtggtacaggcgttgccattattgttggtatgattttgtatgttgctagctatgctcttggcataggtaacgtcccatggcaacaatctgaattgttcccacagtctgttcgaggggttggatccgcttactgtactgctgtcaactggtctggttccctagtaattgcctctactttccttaccatgttggaaaacattacccccacaggaactttttccttctttgctggactgagtttcgtctccttaatttttgtattcttctgttacccggaactttccggtttaaaactagaagaaactcaagagattttaacgggtggattcaacatcaaggcttccttgaagctggccaagcaaagaagaaacaaacagttagaagatcctgacaagatcgttcacaaggttgttgaccaagtctaa

SEQ ID NO: 3902 - DNA, 531 bp, Artificial Sequence
  Optimized genes for Pichia pastoris
atgttgagaagatatttctcttccaactccgccagaatggttcaggttggtcaatctcttcctaaaaccacattatttgtgaaagatccgtcggatcaatttgagagtggcagtattgaacccaattcagtcattgttactgtcccagctgctttctccccaacttgttctgacacccacgttccaggttacttgaccaggctgaaggacttaaaatcaaagaacatcaaccatttgtacgtcgtgtcagtgaatgatcctttcgtcaccaatgcttggaagaagactcttctaaaatcctttagcattgacaagacagaagttcctgtcactttcttggctgatccaaagggtgacttcattcacggtttggacttggattttgactctgcagcagtatttggaaacaaccgttccaagagatctgctctgatcatcggatctgatggtaaggttgccaaggatttcgttgagccagacaacactggactgaaagtttctgccgttgattcggtactcaaggctttgtaa

SEQ ID NO: 3903 - DNA, 504 bp, Artificial Sequence
  Optimized genes for Pichia pastoris
atgatcatctacaaggacattattagcggcgatgagcttctgtccgatgcttatgacgtcaaagaagttggaggagttgtatatgaggccgactgtcagatggtgacagtgggatctggagatgttgatattggtgcaaatccttccgctgaggaaggtggtgaggacttggaggatggtgctcaaactgtcaacaacgttgtctactctttcagattggccgaaactcaatttgacaagaagtcattcatggtttatatcaagggttacatgaagcgtatcagagctcacttgaccgaaaatgctcctgaccaagttgaggcatttgagaaaggtgcctctgcttacgccaaaaaaatactaagttcatttggtgactgggatttctacactggtgaatccatggatccagacggtatgattgttttactcaactacagagaagatggagtcaccccatatgtttctatttggaagcatggtgtcaaggaagagaagatttaa

SEQ ID NO: 3904 - DNA, 837 bp, Artificial Sequence
  Optimized genes for Pichia pastoris
atgttcactagaagcgttagaaactctttcgtcagagccggaccaattagattgggccccgttgtttccaagcgactatactcacaagctcagaacggtggaatcaaccacaagaggattttaatcgggcttggcttattggccattggaacgactctttatggaaccactaacccaaccaagactcctatagcatttgtggagcctgctactgagagagctttcaaagatggtgatgtctcggtcatttttgttctaggtggtccaggtgctggtaaaggtacccaatgtgctaagttggtcagtaattacggttttgtccacttgtccgcaggagatttgctgagggctgagcaaaagcgtgaaggttctaaatatggtgagatgatttcccaatacatcagagatggattgatcgttcctcaggaagttaccattgccctgttagagcaggccatgaaggaaaacttcgaaaagggaaaaacacgttttttgattgacggtttcccaagaaagatggatcaggcaaagacatttgaagagaaggttgccaagtccaaagttacattgttcttcgactgcccagagtctgtcctcctggagcgtcttttgaaaagaggtcaaacttcaggtagagaagatgacaacgctgaatctatcaagaagagattcaagaccttcgttgagacctcaatgcctgttgtggactactttggtaagcaaggtcgtgtacttaaagtgagttgtgatcatccagttgaccaagtctactctcaggttgtctctgtgctgaaggagaagggtatctttgctgacaatgaaactgaaaataaataa

SEQ ID NO: 3905 - DNA, 468 bp, Artificial Sequence
  Optimized genes for Pichia pastoris
atggctactgagctgatcgtgcagagtgagaaggctttccaaaagcaacctcacatttttaccaaccccaaagccaaggccaacaaaaggacaaagagatggcacaaggatgttggtttgggcttcaagactcctaaatccgcaattgagggttcttacattgacaagaaatgcccatttactggaacggtatcaatcagaggtaagattttgaccggaactgtcatttctaccaagatgcacagaaccatcatcataagaagagactacctacattatgttccaaagtacaacagatatgaaaagcgtcataaaaatgttgctgctcatgtttctccagccttccgtgtcaatgaaggtgatttagtaactgtgggacaatgtcgtcctctttcgaaaacagtcagattcaacgttttgaaggttactccagctgtcggtggtaacaagaagttctccaagttttaa

SEQ ID NO: 3906 - DNA, 1026 bp, Artificial Sequence
  Optimized genes for Pichia pastoris
atgtctcattatacatatcttggtgattctggattacaaatttcacgagtcattgtcggatgtatgtcctttggctcaaaaaaatggaatgaatgggttattgaggatgaggacaagatttttgaaatattaaaacattgctatgataagggtattagaacctttgacactgctgactcttactccaacggtgagtctgaaagactactgggaaagttcctgaaggtttacaacatccctcgtgaatctgttgtcattttctctaaagttttcttcccactaggtgacaacgagaagggattcaactacacgacaagagctcaattccctcagcatgaattgatcaatcgtcaaggtctttccagaaagcatatcattgatggtgttagaagctccgttgagagattaggcacttacattgaccttctgcaaatccacagattggaccctaatgtcccaccaaaggagatcatgagagcattgaacaacttggttgaaagtaaccaggtaaggtatttgggagcctcgaccatgaagacctggcaattcgtcaaccttcagaacattgctgagcagaatggatggcacaagtttatttccatgcaaaactattacaatctgttgtaccgtgaggaagagagggaaatgaacgattactgtaagcacaatggtgtcggtttgattccatggtctccgaatgctagaggtatcttgaccagacctttgaagactttgactactagagcaaccactgatgctgctatcaagatggttggtctggattcattatcgcctgagagtgaagaaattatcaacagagttgagaaattggcctctaagaagaacgtgtcaatggctgtgataagtactgcctgggtattgcacaaaggttgtaacccaatcatcggtttctccaaaccatctcgtgtggatgaagctttggaagccctcgacctggagcttctccccgaagatattcaatttttggaggagccatacagagccaacaatgacttgtttgggtaa

SEQ ID NO: 3907 - DNA, 5637 bp, Artificial Sequence
  Optimized genes for Pichia pastoris
atgtcatacaatgatgacaagtactataaccagggatatccttccgagggttaccatccatctgaagaagcccttcaatctcaaggctactacgaccaaggtcagggccagcaaccacatggtttgaaccaaggtggccttcctccacacgagtattaccaatcctatgatcaacagtttgacggataccaccaagaatacacttctgaccctaacctggttggtcatcagggttactacgagcagcctcccagaactgctcaggaccccgaggcattttccgacttctcctacggaccaggaaatggagcgggtacgccatatgacggttacggtgcccaatataccccaagtcagatctcttacggtgatccaagatcttcaaacacttcaactccggtttatggagctggaccttacgatcagtcaggaatggttgcattaccaactgatccttatccagcatggactgctgataaccaagcccctgtctccattgagcaaatcgaggacgttttcattgacttgaccaacaaatttggatttcaaagagattctatgagaaacatgttcgactacttcatggtgttgttggattcacgttcttctagaatgtccccagctcaagctcttctgagccttcatgctgactatatcggaggagaccacgctaattataaaaaatggtactttgctgcccagcttgatttggatgatgaagttggtttcagaaacatgaatcttggtaagctgtccaggaaagccagaaaggccaaaaagaagagcaagaaagctagaaaggttgtggaagagcacgccgatgacacagagagaactttgacagaattggagggtgactcttccctagaagctgctgactacagatggaacgctcgtatgaacgcctacgttcctctggatagagttagacatatcgccttgtacctcttattgtggggagaggccaatcaagtgagatttactccagagtgcttatgcttcatctacaaatgtgcctctgattatcttgagtcagatgcttgtcaacaacgtgttgagccagtccctgagggagattacttgaaccgtatcattactccactctaccgtttcatcagatcacaagtttacgaagttgataacggacgttacgttaagagagagaaggaccacaacaaggttgtcgggtacgacgatgtgaaccaattgttttggtacccagaaggtattgctaagattgtttttgaggatggttctcgcttggtggatgtcccatctgaggagagatacatcagattgggtgaagtcttgtgggaaaatgtgtttttcaagacctacaaggaaatacggtcttggttgcacttcatcactaacttcaatagaatctggatcatccacgtttcgctcttctggatgtacgccgcttacaacagtccaacgttgtacaccaagcattacattcaaactcagaataatcagcccctagcttcctctcgttgggctgctgcagctctggggggaactgtagcctgtgcaattcagattgctgccactatctgcgaatggctttttgtccctagaaaatgggccggtgctcaacatctgtcacgaaggctcatattcttgaccttaatcctggcttgcaatttggctccagttgtttttgttttcgcctgggctggcttggagacttattcccaagctgcttacatcgtttctattgtggtattcttcgtagcagttgctaccattgttttcttttcggtgatgccccttggtggtctgtttacgagctacatgaacaagcgttccagaagatatgtcgcttcacagacttttaccgcttctttcgcgcagctcaagggacttgacatgtggatgtcttatctactgtgggtcgttgtgttcactgccaagaccttagaatcttacttttttttgatcttgtcgctaagagacccaattcgaaatctaagtatcatgaccatgaacagatgtgtcggagaaaggtggttcggtgacaccctttgcagagaacaggctcgtatagtactaggtttgatgtatgttactgacttgttcctgttcttcttggacacttacatgtggtacattctttgtaactgtgtgttcagtgtgggcagaagtttctacttgggaattagcatccttacaccatggagaaatatcttcaccagactgcctaaaagaatttactctaaggtcctggccacaacagatatggagattaagtataagccaaaagtattgatatcgcaagtctggaatgcaatcgtcatttctatgtaccgtgaacatcttttggccatcgaccatgtccaaaaattgctttatcatcaagtaccttcggagatagagggaaaacgaaccttgagagcacctactttctttgtgtctcaagatgataacaattttgataccgagttctttccaagagatagtgaggctgagcgtcgtatctccttcttcgcccagtctttggctactcccattcctgaaccattgccagttgacaatatgccaaccttcacagtcttcacccctcactactctgagaaaattttgctgtctttaagggagatcattagagaagacgaccagttctctagggttaccttgctagagtacttaaagcagctgcacccaattgaatgggactgtttcgtcaaggatactaaaatcttagctgaagagaccagtggattcgataatgacaaccaggagaagaacggcaacaacttgaaatctcagatagacgatctgcccttttactgtattggcttcaaatctgctgctcctgaatacactttgaggactcgtatttgggcatccctcaggtcccagaccctgtacagaaccgtctctggtttcatgaactatgcccgggccatcaagttgctttacagagtcgagaacccagaaattgtccagatgtttggtagcaatgctgagaatttggaaaaagaactggaaagaatggctcgcaggaagttcaagttcgtcgttgctatgcaacgtttgtccaaattcaaaccagaggaattggaaaatgctgaattcctattgagagcctatccagatcttcagatcgcatatttggacgaggaacctccgttgaatgaaggtgaggagccccgtttatactccgctttgatcgatggacattgtgaaatcatggaaaacggtcgtaggagaccaaagtttagagtgcaattatcgggaaacccgatattgggtgatggtaagtctgacaaccagaaccactctataattttcactagaggtgagtacatccagttgattgacgcaaatcaagacaactaccttgaagaatgtttgaagattcgttccgttttagcagagtttgaagaacttaatattgatcatgttaatccatacaccccaggtttgaagtccgaatttgacggtgttaaacaccctgtagccattgtcggtgccagagaatatattttttcggtcaattctggtgtcttaggtgatgttgctgctggaaaggagcaaacatttggcactctttttgcccgtactctagctcaaattggtggtaagctccactatggtcacccagactttctgaacaacatctacatgaccaccaggggcggcgtttccaaggctcaaaagggtttgcatttgaacgaagatatctatgctggtatgacagctatgtgtcgtggtggaagaatcaagcactgtgagtattatcaatgtggtaaaggtagagacctcggatttggttcaattctaaactttacaaccaagatcggtgctggtatgggtgaacaaatgttgagcagagagtactactatctgggtacccaattgcctttagaccgttttttgtcattctattacgctcatcctggtttccacatcaacaacttgtttatccaactctctttgcaaatgtttatgcttactttggtcaacctcaactcattggcccatgagtccattatctgtcagtacaacagaaacattccaatcaccgatattatgtaccctgttggttgttacaacttaatgcctacaattgactggattagacgatacactttatctatctttattgtgtttttcatttcctttatcccattggctgttcaagagctaattgagcgagggatgtggaaggccgctcagagattctgtagacactttatttctctttctcccatgttcgaggtctttgttgcacaaatttactcatcatcgttagtaaatgacctgaccgttggaggtgctagatacatttcaacgggtagaggattcgcaaccgcccgcattccattctctgttctctattccagattcgctgattcctccatctatatgggagcacgctccatgttgttgctgttattcggtactgttgcccactggcaacctgctctattatggttttgggccagcttgtctgccctgatgttttctccatttattttcaaccctcatcaatttgcttggcaagattacttcattgattatcgtgatttcataagatggttaagtagaggtaacaccagatggcatcgtaacagctggattggatacgtcagattgagtcgatcaagaattacaggcttcaagagaaagactattaacgatgagtctgaaaaggctgccggggatgccgcaagagctcacagatccaacattttggttgcagattttatcccttcagctatctacacagccggttgctttacggcttatactttcatgaatgcccaaaacggtgttgccaacgctactgtcgtcaactctgtcctgagaatcgtgatcgtatcgatcgctccgattgttgtcgaccttgccgttttgggtttttgtgctggtcttgcttgttgtgctggtccaatgctaggcttgtgctgtaagaagactggagctgtcatggccggagtagctcacggtatcgcagtcgtgattcatattattgctttcattggtctttgggttttggaggggttcaactttacgaagacattgatgggtttagcagccatgatttatattcaaagattaatatttaaacttatgactctgactatgttaacccgtgagtttaagaatgatcactccaatacttccttctggacaggaaagtggtatggttccggtctgggatggatggcttggactcaaccagccagagagttcgcagcaaaagttattgaaatgagtgaatttgcgggggacttcgtgttaggacacattctgttgttctgccaattcccattactgtgtgttccacttatcgacagatggcactcaatgatgctgttctggctgaagcctagtcgtcaaatcagacctcctatttattcactaaagcaagcaagacttcgtaagagaatggtcaggaattacctgactttgtatttccttgtatttgctattttcgttgctattattgcaggtcctgccgccgcggctggtcaagttaacgttgaagagttgactgaacacttgccggagtttgccgaaggattgattcagccaagaagacaggataataacgacactggtaacaacaatacctggggttggacctatacaccctctactagttcatggtctacaaaggcttaa

SEQ ID NO: 3908 - DNA, 1542 bp, Artificial Sequence
  Optimized genes for Pichia pastoris
atgatcagaagtacgctgcttaggcgaagtattgttactccatgtcgttacaagtccaccaaagttaacttccacagacctgatggtcctggttccaaagatgctgctgagcaagctgatgcaactgccaccatcctcgctgactcattagacttccaaaagcgtattaggccatccgaaagcgcacctaacaagttgacatggcttgacgccttgaacgagaagaagagacaactgtctgaaggtaagacaatatcgtcctttgcttaccaaagcacaaagaccactgctgttggtgaaaagactagaagcgagtctttctcctatttgaccctacctttcaaggatgatgtctggctcagagattcttatataaatgccgctggtagattgagagtcggccaattgtttcaagatctggacgctttggcagggcgcattgcctacagacactgtgctcctgctgagccagtcaacgttaccgcatctgttgacagaatctacattgtcaaaaaggttgatgacatcgagaactacaatttcgtgctaacaggagtagtcacttggaccggtcgttcgtcaatggagatttcagtcaagggttacgctttcccaggagattacccatctgagatcaaggaaactaatttgtctgacgatgccgttttcttgaaggccgactttactttcgttgccagaaacccagagacccacaagtcttttcctatcaaccacttgctgccgaccaacgaaagagaatggttggatttcagacgtgctgaatcacacaatgctcagaagaaacttcgtgccaagttagaaacactagataaagtacctccaactcaacaggagtcaaacttgattcataatctttatatcgcctccaaggctgtcgccaaattagacccagaacagtcttcgaaattgatcttcatgaaggactctcaggtttcttctactttgttcatgcaacctcaataccgtaacagacattcttacatgattttcggtggatacttactccgacagacgtttgaacttgcttattgcgcggccggtgcattttcttgtgccccaccaagatttgtgagtttggattccactaccttcaaagctccagttccagtcggtgccgtgttatttatgaacgctagagtttgctacactgagcacatcaaagaagaaggtgagggtgactccattcctgttttggcttctctgctgaaagcatatgagcttccccccgccaaccaaatttctcatgacagtagtgagtttttgtccagaccaggtactattattcaagttaaggtcgataccaagatcaggaatctggattcagttgaagctattgaatctggatccttcatttactcattctttgttcctcgtgacactgaaggagtcagagacaagccaggctactgttccgtggtaccccagacttacgaggaaatgatgttgtatattgagggaagaagaagagcttttgacaccgcagagtatgctaaagcacttcatgaggctaagaaggcttaa

SEQ ID NO: 3909 - DNA, 450 bp, Artificial Sequence
  Optimized genes for Pichia pastoris
atgccaactcgatttagcgcaacaagaaagcaccgtggtaacgtttctgccggcaaaggccgtgttggtaagcataggaaacatcctgggggaagaggtaaagccggtggtcaacaccaccatagaaccaacatggacaagtatcatccaggttactttggaaaagtaggtatgagacacttcagattgcaacaagctcgttactggagaccagtcatcaacattcagaacttgtggtcattaatacctgaagagaagagagaagatgctttgaagaactcctcggccagttcagcagtggtgattgacactttggccaatggatacggtaaggttctgggaaagggttctcttcccaatattccaatcattgtcaaggctagattcgtctccaaggaagctgagcagtctatcagagctgtcggaggtgttgttgagctagttgcttaa

SEQ ID NO: 3910 - DNA, 1209 bp, Artificial Sequence
  Optimized genes for Pichia pastoris
atgtctaagcaaactccttccggaatgactttcatttcccttgtggacgattccaatgattctccagtcacccaatccacttctgctgataaggatgaaaagcatactgctgtttctcaagagcaaatcaacgctgccggtaagaagcagaaccaagttgatgatgaggaagaagaagagcagaaggaagagtacaagcgttctttggaggagatcgagattaaggatgccgcttactacaagatgaccgaccctgtactactgtacgacattcctgctcaagtcaattcaagtgacgagtatatcaaatggtctcctaacattgtccaaaccagaatgttgctgaaccatttgcagatcccctttgaagttcaatggttaacgtatcctcagataaaaccaactttgcaaaagttgggtgtcaagccatgggatagtgatcctgaatatacacttcctgccatttcttacaaaggaaccacagtgatggggcgaagcgaaattgaggagtttgttaaacaaaactttgatccattgtcgactccaaacttcactgattacttcttggacatagaggacagaaagttcaacagagctatttcaaattactctgaccaaattttgatgggaaagctgtcgttcccattattagcattttcagaatcaattgttgtcaaagatgagaatgacccagaatactttcaaagaaccaagaacgagagattcggtgttgactgtcaggcacttgtcaaggacaaagagaagatccacgagatggtggaagccatctgcaatgaactgccaggtttcatggagctctatgactacagtgaagctgaaaatgccgatttgctttttctaaaagttaacaaatatctgatgggttttcacatcactagagccgacctcatcattgcttcttatgttttctggatcaagacagcagttaaggctggtatggaagagcactccttccacaactactggttcgatgcttggtacaaccgtatctcaaaattacttgactccccatttgacggctccaaggttgagcaggaggctttggatgacttgaacaagagaattgaaggatcccatcagaatagggtacgtgagtctggtgaacagattgatgaaaacgacaagactgagaatgtcaacgaattgaccgagcccgcgagctctaccgttgaacaaccaccggcttaa

SEQ ID NO: 3911 - DNA, 450 bp, Artificial Sequence
  Optimized genes for Pichia pastoris
atgtctgataaattaagtgaggctcaaatttctgagttcaaggaagctttcagccttttcgaccaagatcaggacggtaagattacatccaaggagttgggtattgttatgaggtctttaggacaaactcctactgagtctgaattgaacgatttgatcagagaaattgattcgaacactgacggctcaattgacttcccagaatttctgaccatgatggctagaaagatgagagattcagactctcaggcagagatctttgaagccttcagagtgtttgacaaagatggtgacggaaagatcgacaagggtgaacttaagcacgttttgacttccattggtgagaagctcaccgaggaagaagttgatgaaatgttgcgtgaggccgacaccaacaatgatggagtcatcgatatcaaagagttttccaatctgctagtcaacaaataa

SEQ ID NO: 3912 - DNA, 1518 bp, Artificial Sequence
  Optimized genes for Pichia pastoris
atgtctacctcaagcaagttgggatggttgtccaaattggatgtgagttccactccagaaagaaacttgcgacgttcctcgatcatcggaaccattggtccaaagactaattcaccagaggttttggtttctctgagacaagctggtttgaacattgtccgtatgaacttctcccacggttcttacgagtatcatcagtctgttgtcgacaatgccagaaagtctgaggaaatctatccaggaagacctctcgcaattgctttggacactaaaggtcctgaaataaggacagggacgacaaaaggagaaactgactatgctattccaatgggacatgaaatgattttcaccactgatttgtctttcgcaaaatcgagtgacgacaaggttatgtttattgactacaagaacatcactaaggtcattgaaccaggtaagatcatttacgttgatgatggtgttttatcatttgaggtgttggaggtggtagacgaaaatacgttgaaagtgaggagtatcaacgcaggtgctatttctagccacaagggagtaaatctcccgaatacagacgttgacctacccgctctttccgagaaggataagcaagatttaagattcggtgtcaagaataaagtcaacatggtgtttgcttccttcattagatgtgccaacgatatcaaggagatcagacacgttctaggtgaagatggaaaacagattcaaattattgccaagattgagaaccaacaaggagttaacaactttgatgagattcttgaagtcaccgatggcgtcatggttgccagaggtgacctgggaatagagattcctgctccacaagtttttgttgtgcagaagcagttaatcgcaaagtgtaacctggccggtaaaccagtcatctgtgctactcaaatgttggaatccatgacttacaaccctcgtcccaccagagctgaagtatcagatgttggtaatgctatacttgacggtgccgattgtgtgatgctgtctggtgagactgccaagggtaactatcctcatgaggctgtcgctatgatgcaccacactgctctgatcgctgagtctgccattgcatatctgcctcactacaatgaaattaaggacttagcacgcggattgattaacactgttgagaccatcgcgattgctgctgtatcggcacatttcgaacagaacgccaaagccattgttgttctttctacttcagggacatctgctagaatgatctccaagtaccgtcctaactgcccaatcttgatggtcacaagaaatgacgaggccgctcgttactctcatttgtacagaggcgtttacccatttatttataaacaagaggtcaatgacaactggcaacaggatgtcgaagagagattgcaatacgccatcaccgaagccatcggtatgggtattttgaagaagggtgatgctatcgttgctgttcaaggttggaccaagggccttggtcacaccaacaccatgagagtcgttttcgcttaa

SEQ ID NO: 3913 - DNA, 2106 bp, Artificial Sequence
  Optimized genes for Pichia pastoris
atggtttttcaagttaatgttccagttggtgaggctagaaaaggtgagaccgcaccgagaagatattacaaagtaaaagacgcagcggtgctaaaaccctcagattgtaacccaaagacagaaactgtttacgattacttggttgagatgtttgagcgtcatgaagacaacaaagccatggcttggagagatttagtagacattcataccgagaagaagaaagtcaacaagatgattgatggtgaattgaaaaacattgaaaaagaatggcaatactacgagctctcggactacaagtttatcacttacaaggaattaaagtcaatcatatttgaatatggaagaggtctcgtagaacttggtatcaaacctaaccaagaggagagattgcacatttacgcctctacctctcacaagtggttccaaacctacttagcgacccaaacacagaatattccaattgttacagcatatgacactttgggcgaatcaggtttgacccactccttagttcaaactggctcagtggccattttcaccaacaacgatctgctgcatacactcataaaccctttgaagaaggcagtctctgtgcgtttcatcatccacactgaaaagctggattcaagcgacaagagatacggtggtaagttgtaccaagatgcccaggttgccatagatgagattaaacgtacacatccagatattaagttcatttcttatgatgaaattgtcgctttgggaaggggaagtaagttgaatgctattcctcctaaggctgatgacttgtcttgtatcatgtacacttccggttccaccggaactccaaaaggagtagttctctcccaccgtaacgtccttgctggaattggtggggccagtacattggtcccaagaagtcttatcaacggaaaggacagaattattgccttccttcctcttgctcatatctttgagttagtcttcgagctgatctctttgtggtggggtggatgcttgggttatgctaacgttaagactttaactgatgcttccattagaaactgtcagtctgatttgaaggctttcaagcctactattatggtcggtgttgctgctgtctgggaatcagtcagaaagggtatcctggaccaattgaacaagtctccattcttgctgcagaaggtgttctggggagcttacaagagtaaacaagctatgaagtactgtcacatcccaggtacttcgatcattgacgctgttatcttcagaaaggttaaagctgccacaggcggagagatcagactgttgctaaacggtggttctcccatatcggccgatactcaaagattcattactaacttgttggctccaatgttgctaggctatggtttaactgagactgtggccaacacttgtattaccgatatcgataattttgaatttgacgttgctggtgctcttacgggggccgtgacggtgaaactaatcgacgtacctgaggcaggttactttgctaagaataaccagggagaagttcttattcaaggtgcatgcgtcaccaaggagtactataagaacgaacaagaaactgcttctgttttcgattatgaaaagggatggtttagcaccggtgacatcggtgagtggacttcttctggtcaactgaaggttattgaccgtaaaaaaaatttgatcaagaccctcaatggtgaatacattgctctggagaagatcgagtccgtttatcgatccaactcatatattcacaatgtctgctgttacgctgaccagaataagtccaagccagtggccatcgcagttcctaatgaaaccactcttaggaaactggctgtacagctgaaattggcaagcgccgtcgacgaggttgacttagccaaagttgttcatgactctaaattaatctccaaggtccaccaatctctattggagacggccaagcaacaaggattgactggtattgagttgattcagggtgtcgtcattttggacgaagaatggaccccacaaaatggatttgttacctccgctcaaaagcttcagcgcaagaagattcttgagtctgtcaaggatcgtgttgatgaggtctacagacagaactcctaa

SEQ ID NO: 3914 - DNA, 774 bp, Artificial Sequence
  Optimized genes for Pichia pastoris
atgagtagggaagattcagtttatttggccaaactggccgaacaggctgagagatatgaagaaatggttgagaacatgaagactgttgccagtagcggccttgaactatcagtcgaagaaagaaatcttctttcagtggcatataagaacgttattggtgctagaagagcttcttggagaatcgtcagttccattgagcaaaaggaggaggccaagggtaaccaatctcaagtttcattaattagagagtaccgatccaagatcgagacagaactggccaacatctgcgaggatatactatccgtcctttccgaacatttgattccatctgccagaactggagagtctaaagtattttacttcaagatgaaaggtgactaccaccgttatctcgcagagtttgctgttggagacaaacgtaaggaagctgccaatttatctttggaggcttacaaatcggcatcggatgttgctgtcactgaattgcctcctacacatccaatcagattgggtttggctttgaacttctctgtgttctactacgagattctgaattcacccgatcgtgcttgtcacttggctaagcaggcatttgacgatgccattgctgaattagaaactttgtctgaggaatcttacaaggacagcaccttgatcatgcaattgttgagagacaatctgacgttgtggacttctgacatgtccgagaccggtcaagaggagtcctccaactctcaggacaagaccgaagctgctccaaaggatgaagagtaa

SEQ ID NO: 3915 - DNA, 2529 bp, Artificial Sequence
  Optimized genes for Pichia pastoris
atggtcaactttacagtagaccaaatgagatctttgatggataaggtaactaatgttagaaacatgtctgtcatcgcccatgttgaccatggaaagagcaccttaacagattcattagttcaaagagccggaatcatttccgcagccaaggccggggaggccagattcaccgatacccgtaaggacgaacaagagagaggtatcactattaagtcaaccgcaataagtttatacagtgaaatgggagatgacgacgttaaggagatcaagcaaaaaactgagggaaactcttttttgatcaatttaatcgattctccaggtcacgtcgacttctcttctgaggttacagccgccctgagagtcactgacggtgctttggtcgtggtggactgtgttgaaggtgtctgtgtccaaacagaaactgttctccgtcaagccttgggagaacgtatcaagcctgttgtcgttattaacaaagttgacagagcgctgctggaattgcaggttaccaaagaggacctttaccagtcatttgcccgtactgttgagtctgtcaatgtcgtcatagccacttacacagacaagaccattggtgacaaccaagtttatcctgagcaaggtaccgtggcgtttggctccggtttgcacggttgggccttcacagtaaggcagtttgcaaccagatacagcaaaaaattcggagttgatagaataaagatgatggaaagattgtggggtgattcatacttcaaccctaagactaagaaatggaccaacaaggataaagatgccgctggaaaaccattagagcgtgctttcaatatgtttgttcttgatcccattttcagattatttgctgccatcatgaacttcaaaaaggacgagattcctgtcctccttgaaaagttggagatcaacttgaagcgtgaagagaaggaacttgagggtaaggctttgctgaaggtggttatgaggaagttccttccggcagctgacgctttactggagatgattgtgctacacttgccttctcctgtgactgctcaggcttacagagctgaaaccttgtatgaaggaccttcggatgaccagttctgtattggcatcagagagtgtgatccaaaggctgagcttatggtttacatctccaaaatggtaccaacttccgacaagggtcgtttctatgcatttggtcgcgttttctcagggactgtcaaatcggggcaaaaggtcagaatccaaggccctaactatgttcccggtaagaaggaggatctatttatcaaggctgttcagaggaccgtcctgatgatgggtagaactgtcgagccaattgacgatgttccagcaggtaacattctgggaattgtcggtatcgaccaattcctgttgaaatctggtacattgactactaacgaggctgctcataacatgaaagtcatgaagttttctgtttctccggtagtgcaagtggctgtagaagtcaagaacgccaacgatttgccaaagctagtagagggtcttaagaggctctccaagtctgacccttgcgtattaacgtacatttctgaatcaggtgagcacattgttgctggcacaggagagctgcatttggaaatttgcttacaggacttgcaagatgatcatgctggtgttcccctcaagatctcaccaccagtggtaacgtatagagaaacagtgacgaatgaatcgtccatgaccgctctttctaagtcccagaacaagcacaacagaatttatctgaaagctcaaccaattgatgaggagctaagtctagccattgaggaaggcaaggttcacccaagagatgatttcaaggcacgagcacgtattatggctgatgaatatggatgggatgtcaccgacgccagaaagatttggtgtttcggtccagatggtactggagctaatttggttgtcgatcaatctaaagccgttcaataccttcatgaaatcaaagactccgttgttgccggtttccaattggccaccaaggaaggtcctatcttgggtgaaaatatgagaagtgttcgtgtgaatattttggacgtcactttgcacgccgatgctatccatcgtggtggtggacaagtcattccaaccatgaagagagttacttatgctgctttcttgcttgcagaaccagctattcaggagcctatttttctggtcgaaattcaatgtccagagaatgctattggaggtatttactccgtcttgaataagaagcgaggccaggtgataagcgaagaacagagaccaggaactccacttttcactgttaaagcatacctgccagttaacgaatcctttggatttactggtgagttgagacaagctactgctggtcaagcttttccccagatggtttttgaccactgggctaacatgaatggaaatccattggatcctgcttccaaggttggtgaaatcgttttggctgctagaaaaagacagggtatgaaagaaaacgttcctggttacgaggagtactacgacaaattgtaa

SEQ ID NO: 3916 - DNA, 1578 bp, Artificial Sequence
  Optimized genes for Pichia pastoris
atgttgagaacttctcctgctaccaagaaggcattaaagtcacaaattaatgccttcaatgtcgcagcacttcgtttctactcttccctacctcttcaggtcccaattaccttacctaatggaaaaacgtataaccaaccaacaggactgtttatcaacaatgaatttgttccttccaagcagggaaagacttttgctgttttgaatccttcaactgaagaagagatcacccacgtttacgaatctcgtgaagacgatgtcgaacttgccgtagctgctgcccagaaggcctttgactctacatggtctactcaagatccagctgagagaggtaaggtgttgaacaagctggccgatctgatcgaggagcatagtgagacacttgctgctattgagagcttggacaacggtaaagctatctccagtgcaagaggagatgtgggcttggttgtcgcttacttgaagtcttgtgccggatgggctgataaagtatttggcagggtagttgaaaccggaagttcgcatttcaactacgtcagaagagagccactgggagtttgtggtcagattattccatggaacttccctttgttgatgtggtcatggaaggttggtcctgccctggctacgggcaatacagtagtgctcaaaaccgctgagtctaccccactatctgctctttatgtttcgcagttagtgaaagaagctggaataccggctggtgttcacaatatcgtttctggtttcggcaaaataactggtgaagccattgctactcacccaaagattaagaaggttgctttcactggatccactgctaccggtagacatatcatgaaggctgccgctgaatcaaacttgaaaaaagtcactttggagttgggtggtaaatcaccaaacattgtcttcaacgacgccaacatcaagcaagctgtggccaatatcattttaggtatctactacaacagtggtgaggtctgctgtgctggttccagagtctacgttcaatctgggatttatgatgaactattagccgagttcaagacagctgcggagaacgttaaagtgggtaacccattcgatgaggacactttccaaggtgctcaaacctctcaacagcaattggaaaagatcttgggattcgttgagcgtggtaagaaagatggtgccactctcatcactggtggaggaagacttggtgacaagggttactttgtccagccaactatttttggtgatgttacccccgaaatggagattgttaaggaggaaattttcgggcccgtcgtcaccatttctaagtttgatactatcgacgaagttgttgacttggcaaatgactcccaatatggtttggccgcaggtattcatagcgatgacatcaataaggtcattgacgttgcagccagaatcaaatccggtaccgtttgggttaacacttacaacgatttccaccaaatggttccatttggaggttttggtcaatccggaattggtcgtgagatgggtgtggaagcactggaaaactatacacagtacaaggctatacgagtcaagattaaccacaagaacgagtaa

SEQ ID NO: 3917 - DNA, 876 bp, Artificial Sequence
  Optimized genes for Pichia pastoris
atgtacagaaacttgatcattgccacagctcttacttgtggtgcctattctgcttacgttccttctgaaccatggtccactttgacccccgatgcctcattggagtctgccctaaaggactactctcaaaccttcggtattgctatcaaatctttggacgctgacaagatcaagcgtgaggctgtctctcaaattggtgatggtcagattcaagctgctactatcacctcatctgagccaaaggtcactgcccaagtagtcagtcaaattggcgatggtcaaatccaagctaccacctctaccagttccaaatccaaggagaccgcacaggtcgtttcccaaataggagatgaaactgcacaagttgtgtcgcaaatcggagacggacaaattcaggcaacgacatcaactagttcagaagttaaacagactactggtgttgtttctcagattggggatggccagatccaggccaccactgctacaacatcagtcgcatcgcagataggggatggacaggttcaagaaagcaagccaactgacacttccgaagataaaggtacttctgaccttgtatcttgtttaacggacagctccttagctttggtcttggaaaagggagtgctcaccgatgctcaaggtagaattggtgctattgttgctaatagacaatttcaattcgacggtcctccaccacaagccggaaccatctatgctggtggatggtctatcactgatgacgccaagcttgcattgggtaactccacaactttctaccagtgcctgtccggtaccttttacaacctgtatgatgagaagattggtgagcaatgtgagcctgttgagctggacattgtggatttgattgaatgttaa

SEQ ID NO: 3918 - DNA, 840 bp, Artificial Sequence
  Optimized genes for Pichia pastoris
atgtctctttctttggacaacattgtgcccagttttaggctggacggtagtgtgtccattgtcactggaggaagtggcggacttgcaagcgtaataaccaaagcattacttgctcaaggttctgagattgctgttgttgacttgaatttggagagaaccaaggaggctgctgagttgttgattgaatggggtaaagaaaacttggccaaggccaacggtggttcagtacctcgtgttacttactgggcatgcaacgtcgctgatgctgccaatgtcgaagaggttttcaccaacgttaacaaggaacatggtaagctcgcagagtacttggttcactgtgctggatattgtgaaaatttcccagctcatgaatatcctgccagaaacgccgagtccctagtccaagtcaacctgctcggctcgctgtacgtttctcaatcatttgctagacctttgatcaagtctggtcatagaaatgggtcgatcgttttggtcggatccatgtcaggtaccattgttaatgatcctcagccacaggttgcttacaacatgtccaaggctggtgtcatccacttggcccgttccttagcttgtgagtgggccccgtataacatcagagtcaacactttgtctccaggttacatcttgactccattaacacgaaatgttatttccggtcacacagaaatgaaagattcttgggaatcaaaagttccaatgaagagattggctgaaccaaacgagttcgttggttctgtgctgtatcttctaagcaagactggttcctcttacactacgggacacaatctggtagtggatggtggatacgagtgttggtaa

SEQ ID NO: 3919 - DNA, 1461 bp, Artificial Sequence
  Optimized genes for Pichia pastoris
atgttgaagttcggtcaaagaagattcctgagtacttccagaattttagcacaagctattaaacatgacgttgtcgttattgggggtggtccaggtggatacgtcgcagccatcaaggctgctcaattgggtctggatactgcttgtattgagaagagaggtgccctgggcggtacttgtcttaatgtcggctgcattccttcgaagtctttgctcaacaactctcacttgtaccacactatcaagcacgacactaaagaacgtggtatcaatgtggctgacgtccaaattgacatcggccagctgcaaaatgccaaagagaaatcagttaagcagttgaccggaggtatcgagatgcttttcaagaagaacggtgtcaagtattataagggttccggttcatttgtcgatgagcatactattaatgttgaccccgtagaaggaggagacaaagtggaattaaaagcagataacgttatcattgctactggttcagagccatctcctttcccgggaatcaccgttgatgaagagagaatcgttacgagcacgggagctttggatttgaaagaagtaccaaagagaatggccattatcgggggtggtataataggcctcgaaatggcttcggtctggtctcgtgtgggatccgaagtcaccattattgagtatcgtgactctataggggcaggtatggatgctgaggtagctaaatctactcaaaagttcttgaccaagcaaggattgaagtttaagtgtggtgctaaggttaccaagggagaaagggtgggtgaggttgttaacattgaaattgagacaacaaaggatggtaagactgagcaatttgaggccgatgtcctacttgttgccgttggaaggagaccttacacagagggtttgaacgccgaggctatcggacttgatttcgacaacagaggaacattggtgattgattctgaatatagaactaagcatcctcacatcagagtcattggtgatgtaacctttggaccaatgttagcccacaaggccgaggaggaaggtattgctgccgctgaatttatcaagaaaggtcacggtcatgtcaactacggaaatattccatccgtgatgtacacccaccccgaagttgcttgggttggtcagaatgaacaacagctaaaagaagccggtattaagtacaaggtcggtaaatttccattcattgccaacagtcgagccaagaccaacttggacaccgaaggctttgttaaattccttgctgatgcagagactcagcgtgttctgggtgttcatatcatcggtcctaacgctggagagatgattgcagaagctggtttagcgttagagtacggtgcttccactgaagacattgccagagtttgtcacgctcatccaactttgtctgaggctttcaaggaagcagctctgggaacatttgacaagaccatcaacttctaa

SEQ ID NO: 3920 - DNA, 669 bp, Artificial Sequence
  Optimized genes for Pichia pastoris
atggctaggcgcccagctagatgttaccgttactgtaagaacaaacctttcccaaagtccagatataacagaggtgttcctgaccccaagattagaatctacgacttgggaagaaaaaaagcagccgttgacgatttcccgctgtgtgttcacctagtgagcaatgaaattgaacaattgtcttctgaggcattagaggctgccagaatttgtgccaataagtacattactactcaatccggcagggatagttttcatttacgaatccgtgtccacccatatcatgtacttcgtatcaacaagatgctctcatgcgcaggtgctgatcgtcttcaacagggtatgagaggagcttggggaaaaccacacggtttggctgctcgtgttaccattggtcagattttgatgtcgataagaactaaagattcaaacaaggctgtcgttattgagggactgagaagatctagatacaagttcccaggtcaacaaaagatcatcatttccaagaaatggggttttacaccattggacagagaagactacatcgtgaagagagcctctggtgaaatcagagatgacggtgcctatgtcaagtttttgaccaagaagggtcctctgcaggagaatttggagcaattccctgattacaactatgctgaagccaactaa

SEQ ID NO: 3921 - DNA, 459 bp, Artificial Sequence
  Optimized genes for Pichia pastoris
atgtctcagaatgagagaactttcattgctgtcaaaccagatggtgttcaacgtggcctggtgcctgagatcctttcccgtttctggaacaaaggttacaaactggttgccatcaagttgacattagccaatgaagatttactaagggaacattatgctgacttgacctccaagccatttttcccatctctcctttcatacatgctttcgggaccagttttggctaccgtttgggaaggtaaggatgtggtcaagcaaggtagagctctgttgggagcaaccaaccctttggccagtgcacccggaactatcagaggtgactttgctgttgacatgggaagaaacattatacacggttccgattcagtagagtctgctgagaaggaaattggtttgtggttcaagaaggaggaattggtcgactacaagcctactttgacttcttggatttatgagtaa

SEQ ID NO: 3922 - DNA, 960 bp, Artificial Sequence
  Optimized genes for Pichia pastoris
atgaagtttggactaggatcgcttggtttggctgtcgcactcattccaattgcatctgctttgtacagagttgatgactatgaaacttacgttcctaccactgtcggtcctcatccaacaggtgctattgaaccggctgaagatcaggttgacattaaggttgagccaacggtatattcccaattgctggacgagtttgagaatgtgttaggtgagtctgatggtatggtcaaccatgacaatcttgcgtcgatctggatgtctttctccatgattgtggtttctgaaattggtgacaagactttcctgatcgcagccttgatggctatgagatctccaagatggttggtgtttgccggagcttcatccgctttagttgtcatgactgtgctgtcatgcattgtcggacacattttgcccacactattgactgagaagacaaccaagacccttgcttctatcctgttcgttgttttcggtatcaagttggccaaggaaggttttgaaacacctaaagatgttggtgttgaagaggagctggccgaagtcgaggaagagatcgcattaagttcaatcaacaacaaattggacgatgctgagactggttccgtaagcggatccaacaagaagaaataccaaactactttgagccacttgttggaagaaaccaaagagcttctgtcttttatactatccccaacttttttacaggtcttcaccatgaccttcttgggagaatggggtgatcgttctcaaattgctactatcgccatggccgccagtgctcaattctactttgttatagtcggctccgtactcggccatgctctttgtaccggtattgccgttctggggggaaaacttttggctggtcacatctcattaagggctgttaacttgggtggttctttggccttcttcatttttgctttcatctacttgtatgagatttacatgtaa

SEQ ID NO: 3923 - DNA, 1296 bp, Artificial Sequence
  Optimized genes for Pichia pastoris
atgaagatctctgccctgaccgcttgtgctgttacgttagcgggacttgccattgctgccccagcacctaaaccagaagactgtacaacaactgtccagaagagacaccaacacaagagggctgtggcctacgactatgtgtacgttaccgtaactatcaacggccagggtgaaactatttctccaactgtggtcgctgaattggagaccgtcagcacgcccgccacttcatcaagtgcagttgccacctcctccgctccagctactacctcgtcgatacctgaaaccacaagtgctcaagtcactacatcctctgtggcagaatctacgtccgcccaatttaccagttcaactgaggaagcttcttcatctgttgagcaaaccactcagtccagttcaagctcaagtccgtcatccagttcctccagcagctcttcgtcaggttcctcttctggcagttcatctggtggtattgatggcgatttgtcttggtactctgggcccggcaataaatttcaagatggtaccatcaaatgctcagagttcccatctggaaacggtgttgttgcactcgatcatttgggttttggtggatggtctggactgtatcatccttctgacacctctactggtgggatctgtgagccagatacttactgttcgtatgcttgccagtcaggaatgtccaaaactcaatggccatccgagcagccagacaatggtgtctctgtcggaggtttgtattgtgattcagacggttacctttacagatccaagaaggacactgactacctgtgtgaatggggaatcgatgttgcttatgtcgtttctgagattggtaagactgctgctatttgtcgtacagactacccaggaactgaaaacatggttattcctactgtagtatccccaggtggtgagctacctttgaccaccgttgaccaatcttcttattacacttggagaggtatgaaaacatcggcacaatactacgtcaacgatgctggtgtggactggaccaccggttgcacatggggtgattatggtactgattacggtaactgggctcctttaaacttcggtgccggttatgacaacggtatctcctatctttctttgattccaaatcctaacaacaaggattccttgaactacaatgtcaagattgttgcttacgatgactcctccgttgtcattggagaatgtaagtacgagaatggttcttacaacggaaatggatctgatggatgtactgttgccgttaactctggaaaggccaagttcgttttgtactaa

SEQ ID NO: 3924 - DNA, 513 bp, Artificial Sequence
  Optimized genes for Pichia pastoris
atgaccagatactctgctgttcccgccaaccctgaccgtagtgcatcagccagaggttcctatttacgtgtttctttcaagaacactagagaaactgcccaagctgtcaatggatggaacttgaagaaggcacagcaataccttgatcaagttttggaccacaagagagccattccattcagaagattcaacagctccattggtcgtacaggccagggtaaggagtttggaactgacaaggctagatggccagctaaatctgtgaaatttattcaagatctgctaaaaaatgctgaaagtaatgcagagtccaagggtctggatattgactccttaatcatctctcatatccaagtcaaccaggctccaaagttgcgtaggagaacctttcgagcccacggtagaatcaacgcttacaactcatctccatgtcatattgagttgattctttcggaacctgatgaggctatagagaaggccaaagaagagcctgctcaattgaccgaagcttaa

SEQ ID NO: 3925 - DNA, 1131 bp, Artificial Sequence
  Optimized genes for Pichia pastoris
atgtcctccatagccttccacactttcagaggtagccgtgctaagatggccactgctcttctactgaccggtgccgtgggagccggatcttaccactacgagaagaagagaagacaattcaataataggaacaacaataacaataacaacaagaataataaaaactttgccaaggctttgtttggtttttctactggtaccgcagccgcaacactaaccgatgagtctaaggtcaaggttgctactctgtctgatattcattctttcaaggagtatcagcaagtctacaacgacattgccaaaaagattgaggacgaagatgatttcgatgttgatggttcagcaggccctaatttagtccgtttggcttggcactccgctggtacttacgacaaatatgacaagaacccacacaccaacggagggtcgtatggaggaaccatgagattttccaaagaaggtggagacggtgcaaacaatggactcgcgaagggtagagaatttttggagcccttattgaagaagtacacttggttgagtcatggtgacttgtggactttggccggtgtcgttgccattcaggaaatgggtggtccaaagatcaagtggagacctggaagaaaggatttgtctgaagagtaccaagctcctaacggtaagttgccagatgctgctcaaggtcctgactacgtccgaaaattcttcaacagattggactttacagacagagagatggttgcattaattggtgctcatacacttggcagatgtcacgttacgtcaagtggttacgatggcccatgggattttgctccaactatgtttgataatggtttctttacccaattgcagaagggagttggttctggtgagggtcaatggcatctgaggaaatgggacggaccagaacaatatgaagacaacaactccaactcattaatgatgcttcccgctgacatggctctggtgcaggatcctaagttcaaaaaaatcgttgacgagtttgcagcttctcaagaggcttttttcaacgaattcgccccggctttccaaaagcttttggaatcaggtatccacttcccaaaagagtccaaggaactcgtattccgtacactggatgaacagtcgtaa

SEQ ID NO: 3926 - DNA, 1533 bp, Artificial Sequence
  Optimized genes for Pichia pastoris
atgtctcaacctcctaagtggaccaccagtaatggagctcctgtttctgacgttttcgctaccgagcgtgctactttcgacaacgccaaccacgcaaacaacgctcccaaagtgggaccattactactgcaggacttccaattgattgactctttggcccactttgatcgtgagagaattcctgaaagagttgttcatgctaaaggtgctggtgcctttggtgagtttgaagtgactgacgacatctccgatgtttgtgctgccaagttcctggacaccatcggtaagaaaacaagaatcttcaccagatttagtacggtaggaggagaaaaagggtctgctgattcagctagagaccctcgtggattttccactaaattctacactgaggaaggtaatctagacttggtttataacaacactccaattttctttattcgtgacccatctaagttccctcatttcattcatacacagaagagaaatcccgcaactaatctcaaagatgccaacatgttctgggactacctggtaaataaccaagaatccatccaccaagtcatgtacttgttctcggataggggcactccagcttctttacgcaagatgaacggttactctggtcacacttacaaatggtacaacaagaagggtgaatgggtttacgttcaggtccacttcaagtctgatttgggtgtcgtcaacttcaacaatgaggaggccggaaaacttgcaggagaggaccccgattatcatactggagatcttttcaatgccattgaacgtggcgaatatccttcttggacttgttacatccaaaccatgactcaagagcaagccgccaaacagccattctccgtctttgacttaaccaaggtttggccacacaaggatttcccattgagaagattcggtaagtttacattgaatgaaaacccaaagaactattttgctgaggtcgaacaagctgctttcagtccctcacacaccattccatcaatgcaaccgtcagcagatcctgtgcttcagtccagattattttcttatccagatacccacagacataggcttggtgttaactaccaacagataccggtgaactgtccagtcgctccagtattcactcctcaaatgagagatggttccatgaccgtcaatggtaacctcggctcgacgcctaattacaagtccagtttctgtcctttttcaacagaggctcaaattcagaccaactctcacacaccagaagaggttctggcggctcacactgaaaagtttcattggggtggtatcttggactcaaagagctatgattttgagcagcctagagctttgtggaaggtgtttggaaagactccaggtcaacaaagaaacttttgccataatgttgctgttcacgttgccgcagctaaccatgaaattcaagatcgagtcttcgagtacttttccaaggtctacccagagattggtgatcagatcagaaaggaagttttgcaactgtctccaagaggtgactccgcagccagattgtaa

SEQ ID NO: 3927 - DNA, 1257 bp, Artificial Sequence
  Optimized genes for Pichia pastoris
atgcaatttggtaaggttctttttgcaatatctgccttggccgttacggcccttggtgaaaccacatcatcgctctctgctacgctaacatccactaccagaatctctatcgccagtggatgttccttggaagattttaccgcaacagctcaatccaatttggatgaattgtcagattgtgaggctgtcagaggtgatattcatattgctggaagcctgggctctgctgctatagcaaacgtgaaagccatttatggttctttgattgtcaagaacgctacttctctggtatccctgacagcagactctttaacaaccatcactgagcaattggctttatctgagcttactatccttgacactttgtcttttgcccagctcacctctgttggatccatctactttgtcactctacctgctttagaggaaactgggttccacactggtgtttctgacaccgaatctgtctacatttcggataccgctttgaccaacctggatggtatcgttgccaccgacgttgatgtcttcaacgtcaataataacttcaatttggacacagttgactcccacttggagaccgtgagcagtgcgctggaggtatcgttcaactctgacgatgttgaggtctcgtttgacaacttgttgtgggctaacaacattactttcagaaacgttgcttctgtgagtttgaacaatctaactactgttaacgcctcattgggattcattgagtccggcttccaaaaactgtctttcccaggtattacgagagttggtggttccttttccattgtggacaatgatgatctggaagagattgacttctcaaatgttcaatcaatcggcggaggtttgatcattgccaacaactccaagttgactgatttctccgaatgggaggacttgcaaactgtcggtggtgccttagtacttgaaggtagttttgataatggttcatttccatctctaagggctgttcgtggtgctttcagtttagaatccgatggagacatttcttgtgatgactttagtgacatccgtggagatactgccggtgagtaccagtgctcagcagcctccttctctacctcagcttccgctcagtctagctcaagttcaacttcgaccggtggaagctccacccatactggatcttctactgctacatcttcctcctctgaagacgctggtgtcgctcttgctcctgcatcattattcactcttctggcatctattgttttgggtttcttgtaa

SEQ ID NO: 3928 - DNA, 1512 bp, Artificial Sequence
  Optimized genes for Pichia pastoris
atggtagttcctcgtctttactactctacctcacgtgcagcgttgcaaactgctcgtgccaatcaacgtttagccagaggactcgccaccgctgctgcctccactggtaaagtgagagctgtcattggtgccgtcgttgatgttcaatttgaacaaggtcaattgccagacattttgaacgctttggagttgcagaatggtgaccagaaactagtgcttgaggtagctcaacacttgggtgagaacaccgtcagaaccatagccatggacggaactgaagggcttgtaaggggcacaagcgttaccgacaccggttctcctatctctgttccagttggccgtggtactcttggcagaattatcaatgtcatcggtgaacctattgacgaaagaggtccaatcgaatgtaagcagagaaacccaattcatgctgaccctcccagttttgtcaaccaatcaacagcagcagaggttctggagactggtatcaaggttgtcgatctgctggctccatatgctcgcggtggtaagatcggcttgtttggaggagctggtgttggaaagactgtgttcattcaggaattgatcaacaacattgccaaagctcacggtggattctccgttttcaccggtgtcggagagagaactagagagggaaatgacttgtacagagaaatgaaggaaactggagttattaacttggaaggagactccaaggtcgcattggtttttggtcagatgaacgagccaccaggtgctagggcaagagtcgctctgacaggattgaccattgctgagtacttcagagacgaggagggtcaagacgttttgttatttgttgacaacatcttccgtttcactcaagccggttcagaagtttctgccctgctaggaagaatcccctccgcagtcggttaccagccaactttggccactgacatgggtctcctacaggagcgtataaccactacccaaaagggttcagtcacatcggtacaggccgtttacgttccggctgatgatttgactgatccagctcctgctacgacttttgctcatttggatgctactacagtgctcagtcgagggatttccgaattaggtatttatccagcagtggatcctttagattcgaaatccagacttcttgacgtggcggttgttggacaagagcactatgaagttgccacacaagtccaacagacgttacaagcttacaagtctctgcaggatatcatcgccattcttggtatggatgagctttctgagcaagataaattaaccgttgaaagggctagaaagattcaaagattcttgtctcaaccattcgctgttgcagaagtgtttaccggaattcctggtagactagtcagattgaaagacactgttagatctttcaaggaggtgctggatggtaagtatgatcatctgcctgaaaatgctttctacatggttggtggtattgaagatgtcgtcgccaaggctgagaagttggctgctgaagccaactaa

SEQ ID NO: 3929 - DNA, 1731 bp, Artificial Sequence
  Optimized genes for Pichia pastoris
atgtccttgattggtggaggttccgactgcgcagctggttctaaccctttagcacagtttaccaaacacactcaacatgacacttccttacaacagagtatgagaaacggtgaattccaacaaggtaaccaaagaatgatgcgtaatgaaagtaccatgtcaccaatggagagacaacaaatggaccaatttatgcagcagcaaaacaacccggccttcaacttccaacctatgcagcatgaactgaatgtcatgcaacagaacatgaacgctcctcaacaagttgctaacaattcttggaatcaagagttccgtatgaaagatcccatggttgccaacgctccatctgctcaagtgcagactccagtgcaatccactaactgggctcaagacttccagcaagctggaccagaagttcagcaccacgctcaacagcatcaacatccaattttgagtgttccaggagtcagagccggaatatatggaggcgggcgtttaatgggaggatccatgatgaaccgtgccgctcagatgcaacagcagaatcccgcgcaggcacaaacgtccgaacaatctcaaacccaatgggaagatcagttcaaagacattgaaagcatgttgaactccaagactcaggagcctaagaccaagcaacaagaacagaacacttttgagcaggtctgggatgatatccaagtctcatacgctgacgttgaacttacaaacgatcaatttcaagcccaatgggagaaggactttgctcaatatgctgaaggtcgtctcaactacggtgagtacaagtacgaagaaaagaaccaattcagaaatgatcctgatgcctatgagattggaatgaggctgatggagtcaggtgccaagcttagtgaagccggtctagctttcgaggcagcagtgcagcaagatccaaagcacgttgatgcttggttgaagctgggagaagtccaaactcaaaatgagaaagagtctgatggaattgccgcgcttgaaaaatgtttggaattggaccctaccaacttggccgcattgatgactttggctatttcttacatcaatgacggttacgacaatgctgcttacgccacattagaaagatggattgagactaagtatccagatattgctagccgcgccagatcttctaatcctgatttggatggtggtgacagaatcgagcaaaacaagagagtcactgagctgttcatgaaggcagcccagttatcgcctgacgtggcttcaatggatgctgatgttcaaacaggcctcggggtactattctactctatggaagagtttgacaagaccattgactgtttcaaggctgccatcgaagtagagccagacaaagctttgaattggaacagactgggtgctgctcttgccaattacaacaaaccagaggaggctgttgaagcttattcacgagccttgcaattgaacccaaactttgttagagctcgttacaatcttggtgtttctttcatcaacatgggtagatataaggaggcagtagagcacttgttgaccggtatctcgctgcatgaggttgagggtgtcgatgcatctgaaatgtcttccaaccagggcttacagaataacgcccttgtcgagacactaaaaagggcttttttgggtatgaatagaagagacttggttgacaaggtttacccaggtatgggtctggctcagtttagaaagatgtttgatttctaa

SEQ ID NO: 3930 - DNA, 414 bp, Artificial Sequence
  Optimized genes for Pichia pastoris
atggccagaaccaaacagactgcaaggaaatcgacaggcggaaaggccccaagaaagcaattggcttccaaggctgcccgtaaatcagcaccttctgctgctggtggtgtcaagaagcctcacagatacaagccaggtactgttgctcttagagaaatcagacgtttccagaaatccactgaacttttgattcgtaagttaccattccaaagactggtgcgtgagattgctcaagatttcaagactgacttgagatttcaatcatctgccattggtgctttgcaggagtctgttgaggcttatctagtttctttgtttgaagacaccaacctgtgtgctattcatgccaagagagtcaccatccaaaagaaagatatcctcttagcaagaagattgaggggagagagaagttaa

SEQ ID NO: 3931 - DNA, 312 bp, Artificial Sequence
  Optimized genes for Pichia pastoris
atgtctggccgtggaaaaggtggaaagggtttgggtaagtccggtgccaaacgacacagaaagattttgcgcgacaacattcaaggtatcaccaagccagctatcaggcgtcttgccagaagaggtggtgtcaagagaatttcagcattaatctacgaggaggtcagagctgttctgaaaacatttttggaaaatgtgattagagatgctgtcacttacactgaacatgccaagcgtaagactgttacctctttggatgttgtttacgctctgaagagacagggaagaaccctatatggtttcggagggtaa

SEQ ID NO: 3932 - DNA, 588 bp, Artificial Sequence
  Optimized genes for Pichia pastoris
atggctccaattatccagaagccagctcctttcttcaagaagactgctgttgttgacggcgtatttgaagaagtgtctcttgaccaatacaagggtaaatgggttttattggctttcattcctttggcatttacgtttgtctgtccaactgaaatcattgcttactccgaggctgccaagcaattcgcagaagagggtgctcaagttctgtttgccagtacagactctgagtattctttgttggcctggaccaacgttgccagacaagatggtggtctgggaccggtcaacattccattactagctgacaccaatcacacattatcgaaagattacggagtccttattgaggaagaaggtgtcgcacttagaggtatcttcttgattgacccaaagggagtgttgagacagatcaccataaatgatctccctgtaggacgttccgttgaggagtctctgaggctattgaaggcttttaagttcactgatgaacatggtgaggtctgccccgccaactggcaaccaggtgccgacactatcaagcctgaagttgatgcttccaaggagttcttttcaaaaagcaaataa

SEQ ID NO: 3933 - DNA, 225 bp, Artificial Sequence
  Optimized genes for Pichia pastoris
atgttcagattggcagccaggcagactccaaagagaatgttttccacctctcgtgtggctgcttctggtgctcatggagatgttggtccttactcaaatcttcctttcaaggtcaagaacagaagagtcccctatgctgttccacacttcttgttttttgccattggtatgggtattccattctttgcttgttacgttcaactgaaacgtagtggatccatctaa

SEQ ID NO: 3934 - DNA, 1269 bp, Artificial Sequence
  Optimized genes for Pichia pastoris
atggaaaggttatcgcagttgagaaagcacttggctggtgacgatccagtggagagattgactgctaaaaacagcgatgatgttgtcattgttgcagctttcagaactgccgtaaccaagggaggaaagggtaagttcaaggatgtcaacagtgacgtccttttgcaaaaactaattgagggactgtttgaacagaagcttcctcctggttttgacaagtccctcatcgaggaagttaccgttggtaacgttttgaacccaggcgccggagccaacgagcacagagctgctatgcttgctgcgggcataccgtcatcggtgccattcttggccatcaacagacaatgttcttctggtctgatggccgttaatgacgttgctaataagatcctagtcggtcaaattgcttgtggtttagctgcaggtgtcgaatctatgtcttccaactacggtccttccgccatgccaaaggtatcaaaaagtgtgctcaaacaccctgaaggtgcaaaatgtatgattccaatgggtatcaccaacgaaaacatcaactccaagtttggtatttctcgtaccgcccaggacgagttcgcctccaattcttaccaaaaggctgagaaggccgtgcgagaaggccaattccgtgaagagatcattcctattcaagtagaggttgaagatgaagacgacgaaaatgatgacgatgatgctccagccaagacaaagaccatcactgtggaccaagatgagggtccaagaccaaacgtcactgttgagtctttgggaaaacttagacctgcttttaagaaggacggatctactcatgctggtaatgcttctcaagtctcagatggtgccgcagtcgtcctgttgatgagaagaaacatggctcaggatttgaatcttccaattttagggaagtacattgcatgtactacagtgggtgttcctccagaaatcatgggagttggacccgcatatgctattccagctgttctgaaattggttgacctacccaaggagaaagttacggtctatgaaataaatgaagcatttgctggacaagctttgtactgcattaataaagtaggattggataagaacaaggttaaccctaacggtggagctatcgccctgggtcatccgttaggctgcactggtgccagacaggtttccactattatgagggagttgaagccaggtgagattggagtcacctcaatgtgtatcggtacaggtatgggtgctgccgctgttttcgctcgtgagtaa

SEQ ID NO: 3935 - DNA, 516 bp, Artificial Sequence
  Optimized genes for Pichia pastoris
atggctgctgtctttttcccaagaacttgtttcaagtgtggtgaggtgggacatttggccgagaactgtcagcaagaacagaagctttgctataattgcagagctccaggtcatgaatccaacgattgcccagagccaaagcaaacatcatccaaacagtgctacaactgtaatgaaactggtcacgttcaatctgaatgtgagcaacccaagaaggctgccaaatgctactcttgtggtaagctgggacacttctctcgtcattgtccaaacagttcatcggcctcttctgctggaccagtcgcatcgagctcaaccatctgttacaagtgctccggtcctaaccactttgccagagactgtcaagctggttctcctaaatgttatgcatgtggaaagttgggtcacatttccaaggactgtactgtttctggtggttccaccaaagcttgttacaattgtggggaacaaggccatattagcagggattgtcctcctaccgctgaggccaactaa

SEQ ID NO: 3936 - DNA, 327 bp, Artificial Sequence
  Optimized genes for Pichia pastoris
atgcctccaaagatccaacaatctaaagcagccaaggctgccgctgctatggctggatcgaaaaaatccaagaagaaatggtctaagggtaaggtcaaggacaaggcccagcatgctgttattttggaacaggataaatacgacagaatcatgaaggaagttccaacttacagatacgtcagcgtctctgtgttggttgaccgtctaaagattggtggatcaatggccagagttgctctgaggcaattggagaacgatggtgttatcaagcctgtacttttacactccaagcaacagatttataccagagctacagcaagtgagtaa

SEQ ID NO: 3937 - DNA, 975 bp, Artificial Sequence
  Optimized genes for Pichia pastoris
atgtccaactctttggagcaattgaaagccgctggtaccgtcgtggtaacggacaccggtgaatttgaatcgatagcaaagtacactccacaagatgctaccaccaatcccagtttaatactcgcagcatcaaacaaggctgagtatgctaaactaattgacattgctgttgactacgccaagaagcaaggtggttctgttgaagaacaggccaacattgctttggacaggctgcttattgagtttggcaaagaaattctgaagatcgtccctggaagagtttccactgaggtagatgcccgactgagctttgacaaggaggccactatcaaaaaggccctcgagatcattgaattgtataaatcagttggtgttgagaaagatcgtattttgatcaagattgccagtacatgggaaggtattcaagctgctagagagttggaagccaaatatggtatccactgtaacttgactctactgttctcctttgttcaagcagttgcttgcgctgaagctaaggtcaccttgatttctccatttgtgggcagaatcttagactggtacaaagcatcaactggtaaggattacaagggtgatgaagatccaggtgtccaatctgtcaaggctattttcaactactacaagaaatttggatacgacactattgtgatgggtgcttccttcagaaacactggagaaatcaaggcacttgctggatgtgatttcttgaccatcgctccaaagttgttagaagagctgttgaattcaaaagagcctgttcctcagaagcttgacgcttctgctgcctcttcccttgatatcgagagagtctcttatattgatgacgaggctgctttccgtttcgggttaaatgaagacgccatgtctacagagaagctgtccgagggaatcagaaagttctctgccgattgtgttacacttttgaatttgttgaaggaaaaggttcaggcttaa

SEQ ID NO: 3938 - DNA, 2766 bp, Artificial Sequence
  Optimized genes for Pichia pastoris
atgagattcttggtttcgtctttccgtccattcagacacaccataagttctcacatttctatgggtcaagccctttctgccatcagagttttccacaagaattcgcacagtaggacccagggccttagaagacattctcattattgctgtcacagaaaaattgacatgtccacttctaccaaacttcccgagcgtcaattgttgccagctaatgtgagaccaaccaagtatgacttgaccctggaaccattattctctacattcaagttcaatggagaagaaactatccacttggatgtgcaagaagactccagttccattacgttgcacgctctggacattgatctgcaagattccctactgataacatccaacaagtccaagacgccccctttgcatgtcacaagcaatgatgacgatcaatctttgactttccagttcaaagagggtaccttagttaaaggagataaggtacagcttcagctcaagtttgtcggagagttgaacgacaagatggctggattttatcgttcttcttacgaagagaacggtgaaacaaaatatcttgcgactactcaaatggagccaacagactgtcgtagagcatttccttcattcgacgagccttccttgaaagccgtgttcaacatcgctcttattgctgatcagaaactcacttgtttgtctaacatggacgttaaggaggaacaatcattgggtgacagaagaaagaaggtcattttcaacccaactccattgatttcaacatatctaattgccttcattgttggtgatctcaaatacattgaggctgactacaactaccgtattcctgttagggtttacgctacaccaggtttggagaaacagggtcgtttctccgttgagctggccgctaagacattggaattcttcgagcagcaattcgatatagattacccgctaccgaaaatggatatggttgctattcatgacttttcggccggcgccatggaaaattttggtctagtaacttacagagtcgttgatttattatacgacgaaaagaactctaatttggcaactaaacaacgtgttgctgaggttgttcaacatgaacttgctcatcaatggtttggaaaccttgtaaccatggaatggtgggaagggttgtggctaaatgaaggtttcgctacttggatgtcttggtactcttgtgataaatttttccctgactggaaagtctgggagcaatacgttactgattcgttgcaacaagcattggccttggacgctttacgtgccagtcatccaattgaagttcctgtcaagagagccgatgaaatcaaccagatctttgatgcaatctcttattcaaaaggttcttcactgctaaagatgatttccaaatggttgggtgaggacgtcttcatcaagggagtttcttcctatttgaagaagcaccgatacggtaacactaagaccaccgatctttgggagtctctgtctgaggtgtctggaaaggatgtcgtgaaggttatgtcaatctggactggtaaaatcggtttcccaatcatctccgtcactgaaaacgctaacagaattacttttacacagaatagatacctgaccacgggcgatgttacgccagaggaggataccactatttacccagtttttttgggcctgaagactgagtcatctactgacgagagtttggtcttagattctcggtcaatgagtgttgacattcagaactccgatttttttaaggttaatgctgaacaggccggtatctacagaaccaactatgctcctgagagatggatcaagctgggtaagcaaccacatttgctcagcgtggaagatagagctggattagtggcagatgctggcgccttagcaagctccggtcactcctccaccagaaacttcctgaatttagtcaactcatggaaggatgaatcatcatttgtagtttgggatgagattaccagtcgagtagctgctttgaaggcagcttggttatttgaatctcagtctgacatcgacgcattgaatgcctttgttagagatttgatctcaaccaagatcaaatcaattggatggtcttttaatgacaacgaacctttccttgagcaaagactgaaatctttattgtacgccactgctgctggtgccaaggtgcccggtgtcgtcaagtctgctctcataaactttcaaaagtacgtggcaggtgacaaaactgccattcacccaaacattaaggctgttaccttccaaactgtcgctgcccaagggtccgagaaggaatgggatcagttgttagatatctacaagaaccctgtatccatcgatgagaagatcattgctctacgctccctgggaagatttgaggaccctattttgattgcaaagactcttgcgttgctgtttgatggttccgtcagatctcaagacatctatgttccaatgcaaggtctgagggctaccaagattggtgttgaatcgcttttcaagtggctcacactgaactgggacaagatttataagttgcttccacctggtttgtccatgttgggatctgttgtcaccatcagtacttcaggattcactagtttagacgaccagaagcgtgtcaaagacttctttgcttctaaggacactaagggttttgaccaaggattggctcaagctcttgacaccattcaatccaaggcctcgtgggttcagagagactctaggaatgtctctgattggttgagagaacaaggttacaagaaataa

SEQ ID NO: 3939 - DNA, 1581 bp, Artificial Sequence
  Optimized genes for Pichia pastoris
atgatgactgatcagattggtaaccaagccagtccagcttccaactcctatttgaacaacgatggtattgacgagcttacgcccatgaccagaagaaagcgtgtttcatcattgagcctttctgatcaatgggctggttccttgcaaatgacaccaactacaggctccactggaaacctcaagagaatcggcagctcgaaactaagtatcaacaatggattgaatgctgtccgtgtcaaaaagactgtcattgaccacgtcagagttgcctcttacgctttcgcctttgacattgatggagtaattgtcaagggtcctgagaccattccagaagctaaggaggcattgaaattactgaatggtgctaacgaatataatatcaaggtgccatacattttcgtcaccaacggtggtggaagagctgaacaagctcgtgctgaagagctgtccaaacgactggatattgaggtgactgaggaccaagttatccaaggtcacactccaatgagagaactcgtatctgtgtacaacaacgttctggttattggaggtgtcggcgatgcatgccgtaaagttgctgagaagtatggtttcaagaacgtgttcactcctttggatgtcatgaagtggaatcccagtgtcactccgtaccacaatttaacagaggaggagctagcagtggccagagacgttgacttttccaatacagggatcgatgccattttggtatttgctgattctagaaactgggctgccgaccagcagatcatcctggaactattattatcgaaatctggattcatgggtaccgtttctgactctttcgaagaaggaccagcactttacttcgctcattcagacttcgtttgggccactaactacaacttgtctaggtacggtatgggagctcttcaagtcagtatagcagctttgtatagggaacatactggtaaggaactgcaggttacccgttttggtaaacctcaaagaggtacattcaagtttgcttctaaggtcctgagccagtggagaaaagatgttttggaagagcacgttgaggaattgaccactgaagagggtacttccgacatggaggagcaatctccaggtgatccactactcaatgacccatctcagaacatgaacagaaattcaaagcctacattgttggccaccgagagtgagtctgaatcagattccgataatgaagggcttactgtggaaaagctttccaagttgactttggacttgcctcctgcgtcaactgtttactttgttggtgacaccccagagtcagacatcagatttgccaactctcacgatgaatcttggtactctatattagtcaagaccggtgtttatcaagagggatccattcctaagtacaagccaaaacatatttgtgagaacgtcttggaggctgttaagttcgccatcgagagagagcattctaaagaacttgaggaatggaacaattcggcagtagaccctgatgctgctaccacccaattgtcacctctgacgttagttgaagaaaccaaggttgttccaaagaagcactccgccaaatttgaaatgtaa

SEQ ID NO: 3940 - DNA, 885 bp, Artificial Sequence
  Optimized genes for Pichia pastoris
atgagtgacccaaagccacttcctttcgtttatcaatttttgagtggcgcaattgctggagtttctgaaatccttgtgatgtacccattggacgtggtgaagaccaggattcaattgcaagttggttctggagcaaatgctgaatatactggtattgttgactgcgtcacgaagatcgttaagaacgaaggatttagcagattgtaccgtggtatctccgctccaattttgatggaagctcccaagagagccaccaagtttgctgctaacgatgaatggggtaagttctacagaaacgcctttggagtccaatctatgactcaatcattggccgttctgacaggcgccacagccggtgctactgagtcatttgttgtggtacctttcgagctcgttaaaatcagactgcaagacaagtcttcgaaatactctggtatgggtgacgttgttaaacaaattgtcaagaaggagggcgtactgtccctgtataatggtttggaggctacactttggagacacatctggtggaacgctggttactttggtgtcatcttccaggtacgttccctattgccgaaaaccgagtcttcaacacagaagactgctaatgatttgctatccggggccattggtggaactgtcggtaccattttgaacaccccttttgatgtcgtcaaatccagaattcagaataccgtcaaggttccaggtgttgttcctaagtacaactggactttgccttcgttacttctggtcactaaagaagagggattctctgcattatacaagggtttcttgccaaaagtgctccgattaggaccaggaggtggtatattattggtcgttttcaccacttgtatggatttcttcagaactcttcagtaa

SEQ ID NO: 3941 - DNA, 546 bp, Artificial Sequence
  Optimized genes for Pichia pastoris
atgtcttctaccaacactgttcctccagtgtctcaatataaagagtttgaagttattggaagaagattgccaactgaaaccgtgccagagccaaagttgtatagaatgaccatatttgctaagaacgaaactattgctaaatcgcgatactggtactttttacagaaactacacaaggtcaaacgtgcatctggtgagattgttgccattaaggaggtattggaggagagacctacagaagtcaagactttcggtatctggatcaggtatgactccaggagtggaactcacaacatgtacaaggaatacagagatgtcactcgtgttggtgctgtccaaggtatgtaccaggatttggcctccagacacagagctagattcagatcaattcatatcttgaaggttgttgaacttaccaatgatgatgacatcaagagacaatacgttcgtcaattcctggagaaggacctgaagttcccattacctcatagagtccctaaaacacaggccctttatgcttccaagcgtccctcaacgttctactaa

SEQ ID NO: 3942 - DNA, 306 bp, Artificial Sequence
  Optimized genes for Pichia pastoris
atgagttttgtgatcagaagaaaactttccactttgattccacctaagattgcttctgctaagaacttgggttccaatcctcatgccaagaagatccaagaggttgtcaagttctacaaggctcttccccaaggacaggcctctttcccaaaggcatcgtctccaattggaaaatatggtgaaaaatacttcaacgatggtaacgcttcagccaaaccactgttacacttggctctgggcgttattttgtttggttacagcctagaatattactaccatttgcgtcaccacaagggtgagcattaa

SEQ ID NO: 3943 - DNA, 1311 bp, Artificial Sequence
  Optimized genes for Pichia pastoris
atggctatatccaaggtttttgctcgttacgtttacgactccagaggtaaccctactgtcgaagttgacttgtatacagagaagggactgttcagagctattgtcccatctggcgcatcaacgggtgttcacgaggcattggagttgagagatggggacaagtctaagtggttaggtaagggtgtcctaaaggccgttgccaacgtcaatgacattattgctcccgcaatcgtcaaggcaaacattgatgttaaagaccaggaagccatcgatgcctttttgaacaagttggatggtaccccaaacaaaggtaaacttggcgccaatgcagttctgggggtctctttggccgcggctaaggctggtgctgctgaaaagaacgtgcctttgtaccaacatattgccgatctttccggtactccaaagccttatgtgcttccagtgccgtttcagaacgttttgaatggaggatctcatgctggtggagctttagctttccaagaattcatgattgtgcccaccgatgctccaactttttcagaagctctgcgtattggaacagaagtctaccacaatttaaaaagtcttgccaagaagacctacggtcaatctgctggaaacgtcggtgatgaaggtggtgtggcccctgacatctccactcctaaagaggctctagatttaatctcggccgccattgagaaagctggttacaccggtaagattggtatcgctcttgatgtcgcctctagcgagttctacaaggacggaaagtacgatttggacttcaagaatccaaattcagacccttcgaaatggttgtctggtcaagagttagcagccctatataaggaattgatttctcaatatccaattgtatctatcgaagatccatttgccgaggatgactgggctgcttggtctcacttcttttctaccgttgatattcaaatcgtaggtgacgatctgactgttaccaacccaatcagaatcaagagagccatcgaggagaagtcagctaacgctctcttgttgaaagttaatcagatcggcacattgactgagtcaatcaaggctgctactgatagttatgcagcaggatggggtgttatggtttcccatcgtagtggagaaactgaagacaccacaattgcagacatagctgttggtcttcgagccggtcaaattaagactggtgctcctgctaggtccgagagattggctaaactgaaccagattctgagaattgaagaagagctcggagacaaagccatttacgctggaaaaaacttccacaagtccgtagctatctaa

SEQ ID NO: 3944 - DNA, 615 bp, Artificial Sequence
  Optimized genes for Pichia pastoris
atggcttctccatcatcaaagatccatcatgtgaccaacaagtctcgcgcaaacttgagaactcaaaagagattggctgccagtataattggtgctggtaagaagaaagtttggctggatcctaatgaaactgaacaaattgctcaggccaactcgcgagaagccatcagaaaactatacaaggatggtttaatcgtcaagaaacctccagtcggtcactccagagcccgtgcgagggccttcgcagaggccaaacgtgcaggaagacatacaggctatggtaaaagaaagggtacagccaatgccagaatgtctacccaaactttgtggatgagaagactgagagttctcaggaggctgttagtaaaatacagagacaatggaaagattgacaagaccctttaccacactctttatcgtgaatccaagggaaacgctttcaagcacaagagagctttgattgagcacatcattcaggctaaggctgaggctgctagagagaaggttttgaaggacgagtctgaagctcgtcgtgccaagaacagagctcaacgtgagagaagacagcaaagacaagctgaaaaaagagaagcatttttgaacgaggaggcttaa

SEQ ID NO: 3945 - DNA, 1161 bp, Artificial Sequence
  Optimized genes for Pichia pastoris
atgtccaagaacgcccaagttgatgaccttgctcatggattggctggtgctggaggaggcatactctcaatgattatcacttacccgctgttaacgctaagcacgcacgctcaatcttctaagacccagaaaccattggacggtagtgtcgatgagaaggaattggagccaaagaagtcctcaacttatggaactttgaaacgtattctgaagaaacagggtgttagaggtttatacaatggactggaatcagcaatcttgggaattgccgtcaacaattttatttattactacttctacgagctaacaggcaatactttggaagggctgtctcgtggtagaaaacgaggctccagagtcggtggtctttccgctttccaatccattgttgcaggagctattgctggtgtcatttctagaatcgcaacaaaccctatttgggttgctaacactcgtatgaccgtcttatcacgtgaacaaagagacttgaagagagttaacacattgcaagccattctttacattttcaagactgaaggattcaaaacactgttttctggtttgattccagccctatttctggtgttaaacccaatcattcattatactatttttgaacagctaaaaactcttttggtaaagactagaaagagggcattgactcctttggatgctttgctccttggtgcctttggaaaattgataagcactgttatcacctacccttatgttaccttgagaaccagaatgcacttgcagaacgctgagaatgccagaaattcgtcaggtgagtcttcggtgtccaacagcgcggtactttctgctacttctgacgaagatttgggtaaggagggtgacaacgagaaaaagatcgcccaggagcaaccaaccaacaccatctggggtctcagtaccaagatgcttaaagaagaaggtatctcttccttctattccggtatgtctgtgaagttgtctcaatcaattttaagtgctgcttttttgttctttttcaaggaggagctggtttctgccagtgacgttgccatcaaggctgtcaagaaggttgactacaagtctttcttgaacaaccccgcacaagtcgttcctgatctgaatccagctccttcccccaatgctgatggttctccagtggatatctaa

SEQ ID NO: 3946 - DNA, 621 bp, Artificial Sequence
  Optimized genes for Pichia pastoris
atgtctgttttcactccaattgaagatgccctgaaggcttacaagaatggtgagtttttaattgtgatggatgatgaagacagagagaatgaaggtgacttgattgttgctgctgagctcataacgactcaaaagatggctttcttggtcagatatagttccggttatgtttgtgttcctctttcaaccaaacgtgccgcagaattggagcttcctccaatgatcaagaacagaactgaccgtcaaggtaccgcctacactcatacagtcgatgctagagatggaaccaccactggtatttctgcttctgatagagctttgacctgtcaggtgctggccaacccaagatcgaaacctgaagagttgatgcgaccaggtcacatctgcccattgatcgcaagggaaggcctattgaaggagagaagaggacacactgaagcagccgttcagctgtgtgagttaacaggacttcagcccgctggtgtcattggtgaattagtacgtgatgaggatggttcaatgatgagattggacgactgtgtccaatttggattgagacataatgttaaaatcatcaacctggaccaaattattgagtacatggactccaagaacagctaa

SEQ ID NO: 3947 - DNA, 1683 bp, Artificial Sequence
  Optimized genes for Pichia pastoris
atggctgagatcactttgggtacttacatttttgaaaggttgaagcagatcgatgtcaagactattttcggcgttccaggtgactttaacttggctcttttggatcatatttacgaggttgaaggtatgagatgggccggtaacgccaatgaacttaatgccgcttatgctgccgacggttactcccgtgttaaatccatggctgcattgatcaccacttttggggtgggagagctcagtgctgtcaacggtattgctggttcctttgccgagcacgttgggctgctacatatcgtcggtgtcccagctatttcttcccaagagaagaagctcttattacaccacactcttggcaatggtgattttggtgttttcaagagagtctttaaaaatgtgagtaagtctgctaattttatcagcgatatcaacgaagctcaagacatgattgacggagcaatcagagaggctttcatctaccaaagaccaatttatcttggtcttccaactaatctggtcgaaatgaaagtcgacagaaccagattaaatacaccgatagatttaaagcctgttcctaacccagtggaagccgaagaggaggcattacagtccattcttgagctgatttccaaagcgtccaagccagtcatcttggtcgatgcctgtgcttctcgtcatttctgccaaaaggaagttgaccagttgattgatgttaccaactttcctgtatttgtcactccaatgggtaaaggtggagttgatgaacagaaaccccaattcggtggtgcttacgttggttctctttcaaaccctgacatcactgaattcgtagaaaaggctgatttggtaatatcggttggtgctctgctatcagatttcaacactggttcattctcttactctcattcaaaaaacattgttgagttccactctgattacacccaaattaggtctgcagtgttccaaggagttcaaatgaaggctttgctgcagaagttgttgccattggtgggtaaggcatctaagcacattaccgcccaagtccctccaaagatcgctcctcctattgagaagggtgcctctgaagacttgacacaggactggttgtggtccaacatctcaaagttcttgagagctggagacgttgttattactgagacaggaacgtcggcatttggaattgtccagagcagattcccaacccacgtctctggaatatctcaagttctttggggtagtattggtttttcagtaggagctactttaggagccgtttgtgccacagaagaactagatcccaacagaagagttatcctgtttgttggagatggcagcctgcaattgactgttcaggagatttcgacaatggccagatggaacctgaaaccttatttgttcattttgaacaacgatggatacactatcgagcgtcttatccacggtgagaaagcctcatataatgacattcaaccatgggaccatttgaaactattggacactttcaaagcaaagaactccgagtctacccgagtgtccaccgtgggcgaattgaccaagctgttcaaggaccaaggtttcaacaagcccgacaagattcgtgtcattgaaatcatgttggagaccatggatgctccaatctctttggttaagcaagctgaaattacggccaagaccaatgctgcttaa

SEQ ID NO: 3948 - DNA, 909 bp, Artificial Sequence
  Optimized genes for Pichia pastoris
atgcacagaacttactctttaaggagtggacgtgcaccaactgctgctgatgtgaacaaccctcctccccccacaagcaccaccaagtctaagttctttggtaagaattccattgccagttctttgagaaaaaatgcagctggtgctttcggtccagaactttccaagaagttggcccagctgatcaagattgagaagaacttggagagatccatcgagcttgttgctcgtgagcgtcgtaccgttgccaagcaattgtcattgtggggtgaggagaatgacgatgacgtctctgatgttactgacaaattgggtgttttgatctacgagattggagagttggaagaccagtttgttgacaagtatgatcaatacagaattacgctgaaatctatcagaaacattgaatcttccgtacagccttccagagacagaaagcaaaagatcactgatgaaattgctcatttgaagtacaaggatccacagtcaccaaagattcctgttctcgaacaagagctggtcagagctgaagctgagagtcttgtggccgaggctcaattatccaacatcaccagagaaaaactaaaagctgccttcaactaccaatttgatgccctcgcagaactgtctgaaaagcttgctttgattgcagggtatggaaaggctctgttagaattgttggatgatagcccggtcactccaggtgaaactagaccagcctacgacggctatgaagcctcgaaacaaatcattattgatgctgagaacgctttatcatcttggacccaggacaatgccgcagtcaggccttcgctatcaatacgaaattctgagtatgacgaagagccaaacgaggaatgggaagagaaagaagaaggtgacgagacaagagatgagactcaagcttaa

SEQ ID NO: 3949 - DNA, 1974 bp, Artificial Sequence
  Optimized genes for Pichia pastoris
atgggtaaatccatcggtatcgatttaggtacaacttactcatgcgttgctcactttgctaacgatagagtcgagatcatcgcgaatgaccaaggtaacagaaccactccatctttcgtcgccttcactgacactgagagactgataggagatgcagccaagaaccaggcagctatgaacccagccaacaccgttttcgatgccaagagattaattggtagaaaatttgacgatccagagactcaggccgacatcaagcatttcccattcaaggtcatcaacaaaggaggaaagccaaacatccaagttgagtttaaaggcgaaactaaagtattttctcctgaagaaataagttcaatggttttgactaagatgaaggatacagctgagcaatatttaggagaaaaaatcaatgatgctgtcgttaccgtcccagcatactttaacgactctcagagacaggctacgaaagatgctggactcattgctggattgaacgtccaaagaattatcaatgaaccaaccgctgccgctattgcctacggacttgacaagaaagacgcaggtcacggtgaacacaacattttgatttttgatcttggcggtggtaccttcgacgtttctcttctttcaattgacgaaggaattttcgaagttaaggctactgctggcgacacccatttgggaggtgaggattttgacaatcgcctcgtcaaccacttcattgcagaatttaagagaaagaccaagaaggacttgtccaccaatcaacgttcgctacgaaggctcaggacggcttgtgagagagctaagcgtactctgtcttcctctgctcaaacttcgattgaaattgactccctgtttgagggtattgatttctacacttctatcaccagagccagatttgaggagttgtgtgctgatttgttcagatctactattgagccagttgagcgtgtcttgaaagattccaagctggataagtctcaagtccatgagattgttctggtgggtggatccactagaatcccaaaggtgcagaaattggtctctgacttcttcaacggaaaagagcccaacaagtccattaaccctgatgaggccgttgcttacggtgctgctgttcaagctgccattttatcaggtgatacttcaagcaagactcaagatttactgctacttgatgtcgctccattaagcctgggtattgagacagcaggagggattatgaccaaactgatccccagaaattcaacaattccagctaagaagagtgaaatcttctctacctacgccgataaccaacctggtgtacttattcaggtgtttgaaggtgaacgtacaaggacaaaggacaacaacttgttgggtaagttcgagctaagcggcattcctcctgctccaagaggtgttcctcaaattgaagtcactttcgacatggacgctaatggaatattgaatgtttccgctgtagaaaagggtactggtaagacacagaagatcactatcaccaacgataaaggtcgtttgtctaaagaagatatcgaaagaatggtgtctgaagctgagaaattcaaggatgaagacgagaaggaggctgaaagagttgccgcaaagaatggtttggagtcttatgcttatagtttgaagaactcagctgccgagagtggtttcaaagacaaggttggtgaggacgacttggccaaacttaataagtcggtggaggaaaccatttcttggttggatgaatcccaatctgccagtaccgatgagtacaaggaccgtcaaaaggaattggaagaggtagccaatcctatcatgtccaagttttatggtgcggccggtggagctcctgggggagcccctggcggatttcccgggggttttcctggaggtgctggtgcagctggtggtgccccaggaggcgcagcaccgggtggtgactccggtccaactgttgaagaggttgactaa

SEQ ID NO: 3950 - DNA, 1479 bp, Artificial Sequence
  Optimized genes for Pichia pastoris
atggttgaagccacaggcgacatcggattaatcggtttggccgttatgggtcagaacttgattcttaacgctgctgaccacggtttcaccgtcgttgcttataatagaactgttcagaaagttgatcacttccttgctaacgaggccaagggaaaaagcataattggagctcactccatcgaggaattggttgccaatctgaagagaccaagaaggatcataatactagtaaaggctggtaacccagttgacgctttcattcagcagctgctgcctcacttggaccaaggtgatattatcattgatggtggaaattctcatttccctgacaccaacagaagatatgaagaactcaagcaaaagggtattcactttgtcggctctggtgtttccggtggtgaggagggtgcccgttacggaccttctctaatgccggggggagcaaaggaagcttggccacacatcaaagaaattttccaatccattgccgctaagactgatggagagccatgttgtgattgggttggggacgccggtgctggtcactacgtcaagatggtgcataatggtatcgaatacggtgacatgcaactgatctgtgaggcatatgacttactaaaacgagtggctcgtcttcccgatagtgagatttctaaggtcttcgccaaatggaacaagggtgtccttgactctttcttggtggaaatcaccagagatatcttggcttacaacgatgatgacggtaagcccttagttgagaagatcctggattcagcaggccaaaaaggtactggtaaatggaccgctattaatgcccttgatctgggtatgcctgttaccttaattggtgaggcggtgtttgccagatgtttgtctgccatcaaggatgaacgtgtccgtgcttcaaagattttgtcaggcccttccgtcccagagaatgctatcactgacaaggccaagtttattgacgatttagaacaagccctgtacgcttcgaaaattatttcatatgctcagggatttcaattgatcagagaggcagcaaaagagtacaagtgggacttgaacttcccatctattgctttgatgtggagaggtggttgcattattaggtcggtatttttgggtgaaattactgctgcctacagagaaaaccctgatttggagaacttactatttcatccattcttcaacaatgcaatctccaaagcacagtctggatggagagctactttgggaaaggcaattgagtttggaattccaactccagctttttctacagctctctccttctacgatggttaccgtagcgaaaagttgcctgccaaccttcttcaagctcaaagagactactttggtgctcatactttcaaggttttgccagaagaggctaatgaaagattgaaggtaggagactggattcatatcaactggacaggtaagggcggaaacgtcagtgccagtacgtatgatgcttaa

SEQ ID NO: 3951 - DNA, 840 bp, Artificial Sequence
  Optimized genes for Pichia pastoris
atgggtcaattgttcaggaagatcatccaatggattcctcttctgttttttgccggctctgttctgttgcaattctttgttattttgagcggtgcccgtacaaccggtgtcctaaaggacttctactggttagaagttgaaggtactggagctattgacccccagttcggtaccaccagatggactaattacagaatgtgtaattgggaaaatgatgaattatcaaactgtgagggacctcagccagcgtatccattttctcctgacaacaacttctccgatggtgagaatagagctttgattccgtcagatttcattaaccacagagacacttactactatctgtctcgtgtgggatggtccatgttgttggttggtttggtcttcactgttttctctttcttttcaactcttctgcgaatcttcttgaaatggaagttggtatcaggactgaactggttgaactctgtctttgctgtgtttttcgttgcattgggtgcttccttgatgactgctgcttatgttaaaggtagaaactccttcaacgacgcttctgagtttgatgcctcgcttggggtcaagatgtttgcatttttgtggacctctcttgccttactcttactaagtctgcctatcttctgcttcaagaagccacttagttcctttcatggaggaacaggcacagcctctcacgatgactctatagagtacaaggaagattatattccaccagcaacgggtgatgcttacaacccagagccagctggtgactacccacctacccaaaagagaaaattgaattttttcaaaatcaacagaaagaccactattgaggattaa

SEQ ID NO: 3952 - DNA, 660 bp, Artificial Sequence
  Optimized genes for Pichia pastoris
atgtccaagtctgccctgctgatcattgacttgcaaaatgattttttggagggaggaagtcttgcagttcctgatggtaacgagatcatagatccaattattgaattagctcaaaagaaggactgggatttggtcattgccaccaaggattggcatccacaggatcatacttcatttgcttccaaccatggtgttaaaccatacactgagttagagtttactaacccagagaatgaagctgagaagaagattcaagttgtttggccagaccactgcgttcagaattcaaatggatcagaatttccccctaaattcaaggccttctgggaacaattcactggaccaaaggagctggtcaagaaaggctatcttagcgaccgtgagtactactctgctttctctgacgtctggaagttgcacaagacagagttggactctttactaaagggtcacggtatcagaaacgtcaccattgttggtcttgcactcgatttctgtgtgttccacactgcctctgatgctctgagggaaaactattcggtgacattggtaaccaacttgaccagaagtgttgctgacagagaaggtcctccttccaaacttcagtctttgggtgctcatttggctgaatacaacggttccgaaattatcatcaaataa

SEQ ID NO: 3953 - DNA, 858 bp, Artificial Sequence
  Optimized genes for Pichia pastoris
atgtctcgtttaattgttgcacttcatacggttttgaagagattcaaggagatgggactattcaccgattccgataaggacaactccgacaagttatctgaatcttcgagttccacctcttcaaattggttggacagatacctgtctatcgctagagaagctaagcattctttggcctcaaagattgaagatgttgcactgcccggtgaggatggtactcttttcaacaagaacattgacactaaccgacctgattcaattttcagagctgttttcggtgatgactttgaaacaacatttaacaaagttgactcattggtcaatgccattgctccagtctttgaccaggacgtatggtctgagctctttactggtagtaaacttgtgtcgtccaagtacggtttgtgggcctatccaattccatctcaccaactgtataaggattgtaactctaagcagggcctaagcgtctgggatgagcacggttactggaggtgcctgttcccaaaggctcaattgcctgaaaattacaagtccattgattctaacatcatttcaaaagaggacgttgaacaagatgatagtcacaagttgggtcgtttctttaccaacttctctgactacttgaactggagatctgtcatggaagagaatatcaagaagcaaagagtttccttttctaaacctcagaagagcagtggatcctctacatcatattcggagagaactttaccaaatggagagattgagaaaatcgagaagaaacatgaatggtttgtggatggaactgagcgttccaaagaaaccaagactatcatccaccctgacggttccgtcaccactgaaaacataaaataa

SEQ ID NO: 3954 - DNA, 909 bp, Artificial Sequence
  Optimized genes for Pichia pastoris
atggccgttgttactctgaaaaatgccatccttagtctgtttcctgccaacacctctgactctcaaaacgagccattgctaggtgaggattctactggtaatgctggttatgcagccagagatgttcaaggtttggagtcagaaattgagtccaattcgacgaaaacacagaacatctctgaggacaaccagaatcaaactgtgttgtggggactgtttgaaaaagttgatccaagagtcatgtctgatatcattatcggtttatcagatggtctgaccgtcccttttgctttgaccgcggggctcagctcacttggtgactccaagttggttatcaccggtggaatggctgaattggtcagtggctcgatatccatgggcctaggaggatttttagctgcccgttccgaatctgagttctacaagtcccaggtcagaaaagagaagcaattgttcttcaacaacaaggaacttttagaagaggagttggaagatattttcttggacattggtatgtccgagaccactactgagtctgcaatcagagacttgtctaagtctccaaaggctatgatcgacttcattattaggcacggtaagggtcttgaagaaccagctgatggaagacaagttacatcagcactaacaattggattatcttactttttgggtggtttcgtccccctcgtaccttattttttcactgccattgttcagactggattgatcatcagtgtgcttgtgatgggagtcaccctgttctggtttggttacttgaagactgctatttcaatgggtgaagactgttccctttggatgcgtgtaagcgaaggtttgcaaatggttttgattggctccattgctgctggatctgcttggggtctggttagagttattgacaccaactaa

SEQ ID NO: 3955 - DNA, 1890 bp, Artificial Sequence
  Optimized genes for Pichia pastoris
atgactgttgagaccaaccaattcacttaccttcaggggtccacttttgataagaagatgaccaccctttcattgaagcaaacagcatatgaattcgttgaaggtatgacaggagattatcattatcttaagaacttggatgcttctgactccaatttaaggtatttgaaagactactcattcccaactttacaggaattgaatctatccaacctctcttacctgaagaagttggtatccgacggtgaccagttgtctggattggaaaaattgaccgctgatggaagcaacatcgagttgattgacattaaaggcgatgtgctagcgtccatttcctgctccaacaccaaagagcttaaggctattaagggtgagttgccagcaataaactacatttacgccgacaactcatcactagagtctgtttctttgttgccttacgaggacgagaagtttcaatttaaaagaatgttcttcctgtacttggttaactgccctaacctgatctccttccagaggggacaatatccaaagctcaggacagttgacttgagtaattctaccattcaagttttgcactcttctttaatcaaacatttgggtgctttatacttaggaaatgctactatcaaggagttcgtcattgacgataatgacaatgaagatgagctgacgcttagacagcttaaaacactgaatctcagtaactctcgtataccgacaaacatgaccgacttcttgctgcgtcacatttttagaaagaagtctaacccatgggacaaggaatggtcctcactcatctggcaatccgtcaacactgaccaagaggttcaggaggtccaatcttttatcaagagaattcctcaattgaaaaagctggacatatcgaattcatcgaaagcaaacagcctgttgtcaaatttggtcagtgacattccagagttttggaactctttggaggatttggacgttttcaacagtaatacagagggatttaacttctccaatagcaagtccttgatccacttgggatgttctgatcctgatgccactgtgctaaaggtcgatgacatgccagctttgaaggccctagatgttcttggtccttccaacattgagactgtcaagctttcgaactgtattcgtctggaaaaggttgatttcaccggttgttacgctctgaaacgttttgagtcagacagcttatcactactgcagctgaagttctctaacaattcgctcgaaacttggtctttgaacgactcttccatccgctcaattaccttggagaacaacactggctttcgtcgattagaaggaaactttcctaatcttgaaaccctggatatctctaatagtgccgtagaagtcatcaatattcatgatggttctaagttaaagaaactttctatcttgagaactagatctgtggaagaaatccaaattgataacttatcgacgcttcaagaactgagatacgacaccaaggatgagaaaaatactaaagccgttaaagaatttgctgacaagattctttccaagagagagccatctttcactgctaaggtgttgcaaagagtcagatttgaacacagaggtttatttactggtggtttcagattctttgacagaagaaccgaagagttagtatgctgtttcaaggacatcaacatttctgaaaacaagatcaacgccaaatgtggtatctgtgaggaaaactatgaggagggtcaaaagtgtcagattttgtactgtaagcatgctttccacactgattgtgttgaacaaatgttgcagatgggtaacgatcgttgcagacactgtaatgatgaaattgatattgcttccgttggtttgtccagtgatccccttccattcagatggttgtaa

SEQ ID NO: 3956 - DNA, 1812 bp, Artificial Sequence
  Optimized genes for Pichia pastoris
atgtcttcaattttcatttcatttttcaagttggtacaattgagattcagatactactggaacgtgctcgcctctttcttccctttactcacacttctcagcgatggtttgaaccatgtcttacctccaactagaaagatttctagtgactctgaagaatctcacgagttggatgacaagaagtctctgtttccagaatcccaacaaagaatcacccagatcaaggtcttcaagaacgtccatccttgcagcttgaccttcaacaccaagctggtgccgttcaagaattccaacggtgaaatggaatggaagtttgttgaagacaacgagagcgcagagaagtccccctcattgatggaggatggtttatccgaatctctttctccattcatggctgatagtacgcaagattcagacgtccacctgatgtttggaactcctttcttggttaaggaagagcaacagcaacataaacaagaacaacaacagctacaggaacaggagcaagagcaccagcatcaacaacaccaacagaacttgccttcttcttccaattcaaaagatggatcacaagaccattcatcacttgctgagtcgagcaaagagcttaacatccacaagcgaaatcgtcgcaagagagtctccagtgtggttacctctgtcacaaatggagaaacctattaccactgttccgagtgcccatccaagttcaaatttagaggttacttgactcgtcattctaagaagcactcccagagaaaagcgtatcattgtcccttctacgagtctggtcacggtaagtgttctttgggtgagggattttccagaagagacacttacaaggttcacttgaaggctatgcattttaaatatccaaagggtgtcaaatgtgctgacagaactggtatgatgggatggtgtggatcttgtggtcaaagttttcaaaacaatgaaatctgggttgagcgtcacattgagaaaggtgtttgccgtggtctacctgaaggttattcgtccaggatcatgaccagaaacagaaagaaaactggaaaacagagttcccttctgaacgttgccaacaacggcgtgaatgagaaccctatgttgaaattggtcatggatggggaagttgtttcagctccaaaactggaagatgtcactcatttgctgggcgaatcggggtccaccaatacatggactgaaaatagcgagaatgcctcgaggacatcatccattcatgacttgtccgaccactcttctgcttctgattctttaagtggccacacttctggagagtccttggctggttctaccaacgattcctcctctcagtcactggatgaggccatcaacccaataggacacccagttgaccgttccttatttgcccatcccaattctaatggtgagatgttcggtagatcatggaccgccagagaaagttcgttacactcagtagtggacccttttggtggtcaggttcaagctcaagtacaggcacaaatttacatgaagtcgcaagcagactcccaagtttctcaatctgactctcaaaagcaagtcaacttccaaactaactttcagcagattcctcaaaattttgagaactctgttccattggccatgccaattggtgacgatgatttcccagcattggacggtgaaaacgcttacattgctttgctacagcaacacaggcagcttccagattctcgtccagagagagctaagccagctcatctgggacaggatcctctatttcatccaaacatgcacgtttcttggcttagtcaacctgatcttactttctaa

SEQ ID NO: 3957 - DNA, 1089 bp, Artificial Sequence
  Optimized genes for Pichia pastoris
atgctgaaactttatgctattcgtcctatcagaccaatcaaaccatgtcttgttgcctctactttcagacattattccgtcaaggttgatacctcaaacaaagccgatgtgatcaaggactctcaaactgacactacttccaagcctggtgctgaacacggacacacattgggtcaatatatcactaagaagttgatggttagacagagattgccaaccgagaagagagacgattcttttttgactcctcctgctatgccacaccacggttacagacaagacctgatggagaagattcattacgagcacagagagccaactttgattcgagacaaacttgcattcggattaatgcgtagtttaagggtatgctttgacttcttctccggctacaagcacccaaagaccaaggagggcttggagaaattgacccccgccacatatcagatgactccagaaaaatggttaaccagatttattatactggaatccattgctggtgtcccggggagcgtagcgtccttcttgcgccatttgcaatctcttcgtctgttaaaacgtgacaaggccttcattcaaacgctacaagatgaggcttacaatgaaagaatgcacctcctgacatttctcgaaattggtaagccaggtcctttcatgaaggtgctattatatgcaagtcagggtgttttctgtaatcttttctttttcacctacatgttggctccaaacgcttgtcatcgttttgttggataccttgaggaagaagccgtttacacttacacaacttgtttggaagacatcgagagaggtttgttgcctgatattgagcatttcaaggtccccaagatcgccaaggattactggcacttgtcggaggatgctaagatgagagatctgatttcttacatcagagctgatgaagcaaaacatagagaagtcaaccatacctttgccaatttgaaactagatggtaccgacagaaacccatttgctttgcaggttgactcagtgccagagtctgctcaacctaacaacagactgtcaactcacaaggctgtcggatgggaaagggacgaattggttttgtaa

SEQ ID NO: 3958 - DNA, 1683 bp, Artificial Sequence
  Optimized genes for Pichia pastoris
atgccatcattattgcaagaggacaatgccaccttcaaactggcttctgagttgccggcatttgaggagcttaaagaattgtacaagtccaaaggtaagaatttttctgctaagcaggctttccaaaaagatcctgcgcgatcatctaagttctcccacacttttaaaaactttgatggtactgaggtcttctttgatttctcgaagaacttgatcgatgatgagatcttggctaaactatttgacttagccagacaagccaacgttgagaagttgcgtaatgaaatgttcgcaggtgagcacatcaacgtaacagaagatagagctgttttccacgttgcattgagaaacagagcaaatagaccaatgtacgttgacggtaaaaatgttgctcctgaagttgatagcgtattacaacacatgaaggagttctctacacaagtcagagatggaacatggaagggttacaccggaaagcaaattaccgatgttgtcaacattggcattggtggttctgacttgggtcctgtgatggttactgaagctttgaagccttatgctcaagaaggtcttcatgtgcatttcgtcagtaatgtcgatggcactcacattgctgagaccctgaagtatcttgatcccgaatctactttgttcctgattgcctccaagactttcaccactgctgagactatcagaaatgctaatacagccaaggactggttcctctccaagacaggcaacaagtctgaagccattgcaaagcactttgctgccctttccaccaacgctgaagaagtggccaaatttggtattgacactaagaacatgtttggatttgaaaactgggttggtgggaggtattcagtttggtctgcaatcggtttgtctgttgctatttacattggtttcgacaacttcgaagacttcttgaaaggggcagaggctgtcgaccgtcattttttggaaactcctctggaacagaacatacctgtcattggaggactgctgtcagtctggtacactaatttcttcggttcccagacccacttggtcactccatttgaccaatacatgcacagattcccagcttatttgcagcaattgtccatggagtccaacggtaagagcgtcaccaagggaaatgtgtttgccaactattccactggtccagtagtgttcggagagccaactactaacgcccagcattcatttttccagcttgtccaccaaggaactcatttgattcctgctgactttattttggccgcaaaatctcacaacccagttgccaataacgctcatcagatcctcctagccagtaacttccttgcccaagctgagtctttgttattaggcaaaaccgaggaagaagtagctgctgctggtgctaccggtggacttattccacacaaggtttttagcggtaaccgtccaaccacgtcgatactaacacagaagattacgcccgctactctaggaagtctgatcgcttactacgagcatgttacctttacagagggtgccatctggaacatcaattctttcgatcaatggggtgttgaactcggaaaagttctggccaaggccgttcaaaaggatcttcaagatgacagtgcaaacgtggaagagtcacatgactcttctaccgctcagttaatcaagaagtttaaggcttgggcttaa

SEQ ID NO: 3959 - DNA, 768 bp, Artificial Sequence
  Optimized genes for Pichia pastoris
atggctttgaccaagaaaccagtcatcaagccaattttcatttccaatcttgaccaaattgagaaggttgaaaaagtcgagaagaccagagaacaggcactaaatgacatcagagagaaacttaagtctaataaactgaaacaggaggaaaaggctcgtgaggagaaggaaaagcaagccactgtcatgtcttggtctccgtctcctattgttgccaagaagtccagctcatggggttcacagtcatcaggaagtagtggcagtggaactgaatctccagctattagagactttagaagaaagcagtcccgagaattatttggtgacttcaagttgaacatccctttaaaacaatccaaatctgctcaatctattatggttttgaattcagacaactcctccaactcttccaagagaccttctttcaacaagggaaggtcagagtctgtgttgcaattcactgcttctaacaacaaactggactccatctggttgcacaagatgacgacaatatctcgtcaacattctgtagtgtcgtctttggatggtcaagatcccaatgaagaagacgatatcatggaagatgttgagcaatttcatgttgtttctggtaccactacacctctcgacattccatcttcttgtcaccactccccaggtgattctgagtatcttgatgatgccgattttgttgctgtcagtccaaagtcgcagccaccttccatgtcagatctggcagactactacaaccaaaaccagttcttgtaa

SEQ ID NO: 3960 - DNA, 1074 bp, Artificial Sequence
  Optimized genes for Pichia pastoris
atggattcaattttgaccaacagatgtttgactcccgtctccaaccacgaaactttcaaccttgttggtggttctaagtctttaacaagtgctgagaccagaaagaacagcgatgagcgttcgagtatatccatcccatctccacctttgtccccataccaaagatctcttgatgtggagagagatcataaaatttttgatgttgtcggcaggtcaaatgaccaaattgttggagattttgaagagccagccactaagactcaaactgagcagttggaagaaggaaaaccagatgatgcccctaagattagctcgtccgttctgttatcaaaccaaaccttcccaatcaaggaccttacgaatgccaagctgacagttaatgcttgggcttctatcaactctggtgactcttctttcaaggagaaccagctcgtatttctggactcctattacaacattattgacactagaaaaaaaagagctcctcgtaggaaatatccaaccgcacagccaagaagaagagttttcttctctgcttccgagtcagaaacccccaatgaaagagtcagaacccgtcgtgtgatcagagacaatgtcaagtattcagattacgaatctgaggttgagatctccagaccttccactccaaagcgttcgacaaagagagtgtccaaaccttctactcctcagcctcaattctactctgactacgagtctattccagactactcacccccgttaagcacactacctcctaacaacaccaaagctttgaaagcagaatggaagggtcaaccaatgaacttgagtgacgatccattggttggtaagttgcacccagctgaagtcactttggccagtgtactgagattgccatgtaatgtttacttagattccaagagacgtctattttctgaaaaggtttctagatttcgacttggacttcctttcagaagaactgatgctcaaaaggcctgcaagatcgacgtcaacaaggcatcaaggctgtttgctgcctttgagaaggtcggttggttggatgactatcatttccgtaagttcttggacatgtaa

SEQ ID NO: 3961 - DNA, 1335 bp, Artificial Sequence
  Optimized genes for Pichia pastoris
atggtcaagcaggtactgttgttgggttcaggattcgttgccaagcctacagttgacatcctgagcgcaaataaagacattgaagttactgttgcttgtcgtactttggagaaggccaaggagttggctggttccgttgcaaaggctatttcattagatgtcactgacgaggctgctttggacgctgccgtctctcaagttgatttggtcatttctttgattccatacatttaccatgctacagtggtcaaatctgctatcaaaaacaagaagaacgtcgtcaccacctcctatataaatcctcaattgaaagcactggagcagcagattaaggacgcaggaattgttgttatgaacgaaattggtttggatcctggtattgatcatttgtatgctgttaagaccatcgatgaagtccacagagccggtggtaagatcaagtccttcttgtcttactgtggtggattgccatctccagaagactctgacaaccctttgggatacaagttctcttggtcttcgaggggtgttttactagcactcaccaaccaagctaaatactggaaagatggaaagattgaggaggtttcttctgaagagctgatggccagtgccaaaccttacttcatttatccaggttttgcttttgtctgttatcctaacagagattcaaccacttacaaagagctttacaacattcctgaagctgagaccgttatccgtggaactttacgtttccaaggtttcccagagttcgtaaaggttctcgtggatcttggatttctcaaggaagatgccaatgagatcttctccaaaccaattgcctggaaggatgctcttgctcaatatatcggtgctccgagctcgtccgaggcagaccttgtatccactattgcttccaaggctactttcaagaatgaagctgaccagcaaagaatcatcaatggcctgagatggttagggctttttagtgataatgccataaccccaagaggtaacccccttgacactctatgcgcaacgttggaagaattgatgcaatttgaggaacacgagagagacttggtttgcttgcaacacaagtttggaatcgaatgggccgatggctcatccgaaaccagaaccagtacgttagtggaatatggtgacccaaagggttactctgccatggctaagctggttggtgtcccatgtgctgtggccgttgaacaggtgctggatggtactctttcaacacccggcttgtgggctccaatgactcctgagattaacaacccattaatgaagactctgaaagaaaagtacggtatctttttgactgagaaaacattgtaa

SEQ ID NO: 3962 - DNA, 1152 bp, Artificial Sequence
  Optimized genes for Pichia pastoris
atgacatcaaacagaccactccctttgtttgccagcgcagatgttcaaaagcacgtttctccaaaggattgttgggttactttgtaccacaggaaagtctacaacgtcaccgagtttttggaagaacatccagctggtgacgacttgattttggagtacgccgggaaagatataacgcagatcatgggtgatcaattgagtcatattcattctgaatcagcctatgagatgttggatgaagatatgcttgttggttacctggcaactcctgaggaagagagagagctactgtccaataaagaccacgaagttgaagtccagctggattccaagggaaatgtcgttgaggttgacattgatttgacagaatttggtgagttgcctgctgagggactattatcgctcaagactgattacgagcacgacttagtgaaacaccaattcctggacctgaatcgtcccttgttgatgcaagtcttgagaggttcttggactaaggaattctatcttgaccaagttcatcgaccaagacattatggtaagggttctgctccattatttggaaacttcctagagccactttctatgaccgcttggtggattgttccaatggtttggttaccggtcaacttttactttttctacattggttttaccaatcaaaacaagttggttgctatggccttttggttgctgggtttgttcgtctggaccttcttagaatatgctttgcacagatttctgttccacttggactactacttaccagagaaccagattgctttcactatccatttccttctccacggtatccaccactaccttcctatggataagtacagattggtcatgcctccaactttattcattgtgctgtgttaccctatcaagacattggtgttttctgttttgccatattacatggcttgctccggtttcgccggaggattcttgggctatatcatgtacgacgttacccactatgtacttcatcattccaaacttccccgttacttccaagaacttaagaagtatcatttggagcatcactacaagaactatgaattgggatttggcgtaacttcaaaattctgggacaaggttttcggtacttacttgggtcctgatgacgtgtatcagaagaccaactaa

SEQ ID NO: 3963 - DNA, 1086 bp, Artificial Sequence
  Optimized genes for Pichia pastoris
atgaccccaagatctcatattttttttgacatctctatcaacaaccaaccagctggtagaatcattttcgaattattcaacgatattgttccaaagactgctgagaacttcagagctttaagcacaggggagaaaggtattggtaagtctggtaagccattgcactacaagggttcaactttccaccgtatcatcaaggacttcatggttcaaggaggagattttaccaatggcaatggaactggtggagaatctatttatggtgagaagtttgaggacgaaaattttcaactgacacatgataaacctttcttgctctccatggctaatgccggtcctggtactaacggatctcaattcttcatcaccaccgtacccactccacacttggacaacaagcatgttgtgtttggaaaggtcattgctggcaaagcaaccgtcagaaagattgaaaggaactctgaaggtgaggctcctatcgagccagttgttatagaagattgtggtgaactaccggaagacgcagaccttactatttctgacgagaccggtgacaagtatgaggaggtcttgaaggataatgaaaacattgacattgatgactttgaacaggtctaccaagctatcactgagatcaaggagttgggtaccaagtacttcaagaacggtgatacgaaaattgcctttgaaaaatatcagaaagctgccaactatctgctagagtacattcctagtgatctttccgaagagcaatcatcgaaattggaacttctgaaaacaagtgtgttctccaatgtcgcgttggctggactcaaggtttccaaattcaaagacactatcaaatacgccactttggttattgaggatgagtcagcagatgctaaggcaaagtccaagggctactacagaagaggttccgcttactcaagtcttaaagatgaagattctgccatcagcgatttccagaaggctttggagttatctcctggagacccagccatttcccagtctttgcaaagaactacaaaggcccgtaaggaccgattggccaaggaaaaggctgctctgtcgaagttctttgagtaa

SEQ ID NO: 3964 - DNA, 1641 bp, Artificial Sequence
  Optimized genes for Pichia pastoris
atgttgagtgctagacccgtgatcagaagagctgctaggagcgctgtagccattaacgttgccagatctgtgcctcgtgtcgtcagacctttggtgtctagaggttacgctgctgccaaggccgctcctacagaggtttcctccatcctagaggagaagattcgtggcgtatcagcagaggctgacctgaacgaaaccggtcgtgttctctccgtcggagacggtattgctcgagtgtttggattgaacaactgtcaagctgaggagcttgttgagttctcttctggtgtcaagggtatggctttaaatctggagccaggtcaagtaggtatcgttttgttcggttccgaccgtggtgtcaaggaaggtgacactgtgaaaagaaccggaaaaattgtcgatgttccagttggtcctgaattgctcgggcgagtcattgacgcccttggtaacccaattgatggtaaaggtccaatcaactctaaggtcacttccagagcccaacttaaagctcccggaatacttccaagaacttcagtttttgaaccaatgcaaacaggactcaagtccgttgatgctcttgtgccagtcggtcgcggccaaagagagttgattataggagatagacaaactggtaagactgctgtcgccctggatacaattttaaaccaaaagagatggaacaatggctctgatgagtccaagaagttatactgtgtctacgttgctgttggtcagaagcgttctactgttgctcaattggtccagaccttggagcagaatgatgcattgaagtattcgatcattgttgcagcgacggcttctgaagccgcaccattgcaatacctggctccattcactgcctgcgccgttggagaatggttcagagacaatggaaagcacgctctgatcatctacgacgatcttagcaaacaggcagtggcatacagacagctgagcctattgttgagacgtcctcctggacgtgaggcctacccaggtgatgtattttaccttcattcaaggctgttggaaagggctgctaagatgtctgacaagttgggtggagggtcgctgaccgctttgcctgttattgaaacacaaggtggtgacgtttctgcttacattccaaccaacgtcatctccattaccgatggacaaattttcttagaagctgaacttttctacaagggaattagaccagctatcaatgtaggattatctgtttcgagagttggatcagcggcacaggttaaggctatgaagcaagttgccggttcattgaagctattccttgctcaatatagagaagtggctgcatttgcccagtttggtagtgacttggatgcctcaaccaagcagactttgaacagaggtgagcgtttgactcaattgctaaaacaaaaacagtatgcaccgttggctgccgaagaacaagtccccgttatctatgctggtgttaacggtttcttggacagtgttcctcttgagagaattggtcaatttgaggaagagtttttggcctatttgaaatccaatgaaactgaagttttagaggcaatcagagtcaaaggccagttgagtgatgaattactggccaaactgaagtctgccactgagtctttcgtcgctaccttctaa

SEQ ID NO: 3965 - DNA, 1212 bp, Artificial Sequence
  Optimized genes for Pichia pastoris
atgtcggaaggtatcattgagatcgataccaacctgatcgagactaactacgaccaggtggtatccacttttgacgaactgaacttgaaagagcaaatattgagagcagttttcgcatatgggtacgagtttccttccgcaattcaatccagagctattcttccaattgttgctggtagagatgttcttgcccaggctcaaagtggtactggtaagactgccacatttgccatatcagcgcttcagcgtcttgacgagaagttgaaggctgcccaagttttgattctcgcccccaccagagagttagcactacaaatcaaaaaagttgttttggctttgggtatgcatttgaacatttctgtccacgcttgtattggaggtgtggatcctgctttagatgtgaaagctttcaactctggtgtccaaattgtcgtcggaactccaggtcgtgtgcaggacatgattgaaaggggcgccttcagaaccgagaatgtcaagatggttattctggatgaagctgatgaaatgttgtctaccggtttcaaggaacagatctacactctgttcaccttgctaccttcaacaacccaggtagtgctactctctgctaccatgcctcaagaggtcttggaagttaccaccaaattcatgaacaacccaatccgtatcttagttaagaaggatcagttaactttggagggaatcaagcaattctacgttgatgttggtgaggaacaatacaagttcgactgtttgtgtgatttgtatgattcaatctcagttactcaagctgtcattttctgcaatacgcgtcgtaaggttgaagagctgacagaaagattgactgctcagaagtttaccgtttctgccattcactctgagctttctcaaactgagagagacactatcatgcaagaatttagaactggaagtagcaggattctgatctccacagacttgctggctagaggtattgacgttcaacaagtctctttggtcatcaattatgacttaccatccaacaaagaaaattacattcatagaattggtcgaggaggcagatttggaagaaagggtgttgccatcaacttcgtcacgtccaaggacgtagagatgatgaaggagattgagaaattttattctacacagattgatgagttgccaagttcaatcactgacctttttgaaactgaagaagtcaatgaatcgtaa

SEQ ID NO: 3966 - DNA, 801 bp, Artificial Sequence
  Optimized genes for Pichia pastoris
atgttgcttggtttccaacgtttcccaaaattccacactttaaccagaaagtctccaatcaactcaataaggagtctacgttacaagtttcaaagacctcttttaacgccattgtttttatccccaattatcaagcaatccatgaacctggtaaccatttcagactctatcagagaaaatttgattaaacatgaggtcattccagatgttatcaaagataaatcatttgttccaaagggtcttttgatcatttcttatggatcaccggacaaggaagttgttttgggtaacactctgaaagttgaggacgcccagtccattcccaagatcactttcactgttaacttgaatgaagagcaagagattgcttctttcttcgatgagaagttcacactcgtagtgacagaccccgatgcaccttccagaactgacaataaatggtctgagttctgtcactacgtcgtgtctgatctgtctttgagcaccaagtccggaaccactgatgctgaagatcaagtcaattttaccaccgatttgaaggttgacactattcctgaaagtgactccaagactttggtcccttatttgggaccaggtccacctccaaagacaggccttcatagatacgtttttttgctgtacaaacagaagcctggggtgagcttagaaggtcctgatcctaagaacagaccaaactggggtactggtatcccaggatctggtgtttctgactgggctgccaagaattcgctttcgctattggccgtcaactttttctttgctcagaacaaggacaactaa

SEQ ID NO: 3967 - DNA, 1038 bp, Artificial Sequence
  Optimized genes for Pichia pastoris
atgaccttatctcttctccttaggtcaaccaacattttcagagccccaaccgccatcgaaactcaaacccaaaccactccagctttcactgaacctcaagttctgaaacttaagcaaaacgtcagaaacccagattctttggtggccaacgctgtaacgcctgcatttgactggaacacttttgagtttgctccaattcgtgaatcgacagtgtccagagctatgactaaaagatattttgccgatttagacaagtacgctgaatctgacgttgttatcgtcggcgcagggagcgctggtctatcagctgcctacactcttggtaaggctcgaccggatctgaagatcgccataattgaaagtaatgtagccgttggtggaggatgtttcctgggaggccagttgtttagtgccatggttttacgtaaacctgctcatttgttcttgaacgatttgggtttggagtatgaggatgaaggtgattacgttgtggtaaagcacgcggcttacttcattacaacactctgttccaaggttttggctctacccaatgtcaagctgttcaacgcaacggctgttgaggacttgttaacacgtaaggacgagaatggtcaaatcagaattgccggcgtcgtcactaactggactttggttaccatgcaccaccatgaccagtcttgtatggaccctaataccatcaatgctaatgttgtgttgtctgccactggtcacgatggaccttttggtgccttctgtatcaagagaggtgtcgagattggtgctgtcaagaagatggatggtatgagaggattggacatgaacaaggccgaagacgcagttgtcaaaggtgcatccgaaattgctccaggtctggtcgttgctggaatggaagttgccgagcattcaggatccaacagaatgggtccaactttcggagcaatggctttgtccggtgttaaagctgctgaggaggtcttgaaggtgtttgatgagagaaagaaacagaaccaacagtgctacggtggtctttctgcttaa

SEQ ID NO: 3968 - DNA, 4503 bp, Artificial Sequence
  Optimized genes for Pichia pastoris
atgtacaacccttacggtaacggtggttatggtaatggaattccacagtttcagcagaacgtctaccaaggtcaacagcagcctcaacaacaacctcagcaacaagcccagcaacaggcccaattccaacaacctcagccaactggtttccaaccatcaagctcatttggtgttggtcttgtcgctcaacaaaccggcatccagccacaaggcctacagaataacccagccatgttccaacagcaacaatttcaaccaggtttgcagtcgcaacaaactggtttcaatgctcaggtcattcagtctcaaccgaccggttattctcaaccaacatcaagtgctgccccaactcagaaaggtcacgaacttaagattcccgctatcagattgagtttcattacccaacaagaccaggagaagttcgaacagttgttcaagtcaagcgttcctcctggtgaaaatgcaattgatggatctaccgccagagatatattgcttaggtccaacatcccatccagtcaactggctgagatttggactctctccgatactaccagaagcggcaaacttttattcccagaatttgctttagctcttcacctgtgtaacgttgtgctgagaggtgaaaacttgccctttgaattgccaactaccttgaagaatgaagtttcttcttttgttgacgttatcagttttggtgttggtgaggaagacgatacccagaacaacaacaccccattctccaatgatctgctctcctcggcacaaacttctcagcaaaaccagcaaaaccaacctttgtctttccaacagaccggttttcaatcctctaatcaagtacctcaactaccacagacttcattcggtaacattggtatccaatcacaacccacaggtctgcaaccagttccagcccagaagaccggttctctggttcctgtcgtcactggtggtttgtcggctcaacaaacgggattcagaccattgcaatctcagtccaccgggtatcagccaccacttcaaaaccagacaacaggatatcaattgccactgcaaaatcagaccactgggtatcagccaccattacaaaaccaaactactgggtaccaacctccactacaaaaccaaactacaggctatcaacagcctcttcagaaccaaaccacgggttaccaggcacccttgcaaagtcaaaccaccggatacaagccgttacaagcccaaacaactggcttccagcctccgttacagaaccagactacgggctatcaacagccactccaatctcaaaacacaggatttcagcaacccctgcaatcccaaacgactggttaccagccattgcagtcccaaactactggttatcaacagccgctgcagtctcaattgactggatttcaacagagtcttcagtcccagcccactggtttgcaaccaatgcctaccggtaaacctggacaatggggattcgtcgcaacccctacgggtggtttaccaggattggacatgatgcaatctcatttcatgccaaactcttcaactcaactttcgcaattacagcagcccatgaatgctcaatccaacactaatgtcccatgggctattactaagaacgagaagcaaatttacgacaagattttcaaagaatgggatcaagatcacaagggatacattgacggtccatccgccatctctatcttcggaaaaagtggattagcccgtcaagacttggaaaaaatctggaacctggccgatcagaataacagaggaaagttgaacaaggacgagtttgccgttgctatgcacttggtttacagaagactgaatgggctcgacattcctaacgtattgcctcctgaactgattccgccaagctctaagatcttgaaagagtcactgaacgatatgaagtctaagtttagacaatctaactttggatcaagcagcaacaatttgtccaaatccggccgtgatggtaccaggtttaagaataatgatgatgacttcggatacaaactgtccattcctgagttaaaaaaactagttcatgaaaaacagatcattttggatgcttacgattcgcaggacactgatgttcaaaagcagagtgaccaattgacacaaaagactggacacgatattgagatactaaaggcgaagatcaagaacattcaatctgaactaaatgagaagcaaccttttgactcaaatgcccccggtttatcaaagcgtgaccttagacagagaattgactcactgtcagacaaagtttcccatatcatggaccaaatattcaacgttgaggaacaaatccagaacgccaagatagaacaagccaggttaagaatcgaggaggagaacccatctggtgtcgagctcaagggtacaggaccaaatggtattattacagagtctgataagagacacgctaaatctagagccattctgaagagtcgtatggcttctctaactggtaagacagcaccagatatcaacgctttcgaggctaacgaagagaaattggctgaggaagtagtgcgaatcaaagcccaaaccactgagggtcgttcattgattgaagatgtccaaaattcaattaaggatttgaaagatagtgcattgaattcccttgaagaatcagtctctagcgaggtcgggtttgagaaatgggaaaagggtcagggtgtgtctagcaaggaagtgaaggagctgataaaattgttgaacgactccaagcccaaggtcgccccagtctccgttaagcaggatgttgttgccgagcaagctccatccaaggttgcatctgttcctgtaagccaagaatctacaggctcttcatcggttgcctcagagcctcatggaactccagactcttactcttcctacaagaaccctgctgacagagctaagtacatcaaggagcaggctgaaaagagaatgaacgagcgtttacagaagttgggaatctcccgtaaggctaagtcctcttcttctccacccgttaatcaatcatccccccatgacaaggcagctcaaagtccaattagatccccagtcggcaacgcgcagacctccgaagtcatcaagaagccaactgctacatcgtccgacaacaacgccgaacgactacccgagaaggagacacctgccaaggaaaccgtgagtgccaaaaatccagagtataaagaagaatcgtctgacgatgataacgatgaagagcttcgcaaattgatggaggagaaggctagattggaggagcaacacaaacaaaaaaagttgaagaagaaacaagagagagaggcaaagcttgcagaactcagaaaacagatggaagagatgagaaaggctgaagaaagtgatgactcttgggacgaaaagactccttctcaagttccgactcaacctcctccaagagaaactccagctcaagtccctgttgtcaatatcgattccgtcaagtctgtccctgaaaagccaaaggaaattgttagagaaccagtgccagtagtaaggtcagccacatcttctgagcacaatcctttctctaaaccatctactgacaccgctaccccaatccaagtggcttcctcgaacccatttttcaagcctcaacagtctgagccagtcgtcgaccctgtgaaaattgaagctcaacgtttggcccaaagaggtgctgttgctaatgacgacgacgatgactggggtgattctgacggaaacgactcttccgagggcgaagcccctactagaaactccggtcctgctcatttggcctctttgctgttccgtaacggttctttacctaaggtaccaaccactgaatcctccagtgagaaacgtgaggttccagcttcttcgcaatcgtccactcttaatcttcaaccagaaagccaagcacagcctaccaagattgagaccagcaaagctggttcatctgattcagattctgactcacagttcggtactcctacctcaggagctgctgatgatacattttctcctccaccaattccagaggcccccccagtgcctcaagctcctccgattccacaaggtattgccccacctccagttccccaaacttccgctggatccttttcaccacagatcgaagcaagtccggcgcaaccaggtatcgttaccaaccactccggttcctctgtgccacctgttccacagacgagtgtgccagctgctccaccttctgcccctccccttccacaaacctctgctccccctgcaccgccagcaccacccatccctcagacttctgctccacctgctcctccagctcctcctgctcctcctattcctcaaatgtctgcaccacctgccccaccaacaccacagattgctgcaccttcagctccaactcccccagctactttgggtggaggactttccgctttgttaggtgagatccaaggaggtaaggccttgagaaaggttgatccaagtagccagcatatttctgagggaaccaccgtcggtagagttttgtaa

SEQ ID NO: 3969 - DNA, 453 bp, Artificial Sequence
  Optimized genes for Pichia pastoris
atgcaaattttcgtcaagacactaactggtaagaccatcactttggaggttgagtccagtgacaccattgacaatgttaaatccaagatccaggacaaggaaggtattccacctgatcagcaaagattgatttttgctggaaagcaattggaagatggaagaactctgtctgactacaacattcagaaggagtctacgcttcatttggtattaaggttaagaggtggtggcaagaagaagaaaaaaaagaactataccacaccaaagaaaatcaagcacaagcatagaaaggttaagttggcagtccttaattactacaaggtggatgacgatggtaaaattgagcgtctcagaagagaatgtgacacttgtggtgctggtatcttcatggccaacatgtctgatcgtcaatattgcggaaaatgtcacaccactatcaaactgtcaaaataa

SEQ ID NO: 3970 - DNA, 1842 bp, Artificial Sequence
  Optimized genes for Pichia pastoris
atggctgacggtgttttccagggcgcaatcggaattgacttggggacaacttactcttgtgttgctacttatgactcggccgttgaaattattgccaatgaacagggaaacagagtcactccttcatttgttgccttcactccagaggaaagattgatcggtgatgcagccaagaaccaagctgcattgaaccctaagaatactgtctttgatgctaaaaggcttataggccgtgcatttgacgatgaatctgttcagaaagacatcaaatcttggccattcaaggtcgtcaacgataatggtaatcccctaattgaggtcgaatacttaggagaaaccaagcagttttctcctcaagagataagttcaatggttttaacgaaaatgaaggaggtagcagaggctaagattggtcagaaggttgaaaaggccgtagtaacagtgccagcttacttcaacgacgctcagagacaagccaccaaagatgccggtgctatttccggtttgaatgtcttgagaatcattaacgaacctacggctgctgccattgcttatggattgggagctggtaagtctgaagaggagaagcacgttttgattttcgaccttggaggtggtaccttcgatgtttccctattgcacatcgctggaggggtgttcacagtcaaggctaccgctggtgacactcatttgggtggacaagatttcgacaccaaccttttagagtttttcaagaaggaattccaaaaaaagactggtaaagatatctcggatgatgctagagctcttagaagactaagaactgcttgtgagagagccaagagaaccctctcaagcgtagctcaaactaccgttgaggttgattctctgtttgatggtgaggactttacagctgagatttctcgtgcaaagtttgaagctatcaatgctgatctgttcaaatcgactttggaaccggtggaacaagttcttaaggattccaaaattgaaaaatccaaggttgacgatgtggtgctagttggtggttctaccagaattcctaaagttcaaaagttgctgtccgacttctttgacggaaaacaattggagaaatcaatcaacccagacgaagcagtggcctacggtgctgctgtccagggtgcaatcctgacaggacagtccacttcagaagaaactaaggacctgttattgttggatgtcatcccattgagtttaggtgtcgccatgcaaggtaacgtttttgcccccgttgtcccaagaaacaccactgttccaactatcaagcgtaggactttcaccaccgtggatgaccaccaaaccacggtccaattcccagtctaccaaggagagcgtgtcaattgctctgagaacactcttttgggtgaatttgatttgaagaacattccacctatgtctgccggcgagccagtacttgaggcaatttttgagattgatgctaacggtattctcaaagtcacagctgttgagaagtccaccggtcgaagtgccaacatcaccatctccaactccattggtagactgagtagctcagagatagaaaagatgattaatgatgccgacaagttcaagaaggcagacgaggattttgctaatcgccatgaatcaaagcaaaagcttgaagcctatgtttcttccatcgagtctactattactgatcctattctcagctctaagctgaagagatctgctaaggataagatcgaatccgctttatctgacgcgttggccgctctggagctggaagacgcctctggagacgacttcagaaaggcggagttggctttgaaacgtgttgttacaaaagctatggccactcgttaa

SEQ ID NO: 3971 - DNA, 960 bp, Artificial Sequence
  Optimized genes for Pichia pastoris
atggctacattgttgaaattgaacaatggattaaaacttcctcaagtgggattgggtgtctggaagattcctaatgaactgacagctgagaccgtctacaacgctatcaagcaaggttacagactgtttgatggtgctgaagactacggtaatgagaaggaagttggacaaggcgtcagaagagccattgatgaaggtttggtcaagagagaggacttgttcattgtctccaagttgtggaacaactaccaccatcctgacaacgttggtaaggcacttgacagaactttgtctgacttagggctggactatttggatctattttacatccacttcccaattgccttcaagtttgttcccttggaagaaaaatatcctccagctttctactgtggtgatggaaataacttccactatgaagatgttcctctgttggacacttaccgtgccttggagagattggtagatgctggtcgtatcaagtctcttggtgtttccaatttcaacggtgcactcctacaggatcttttaaggggtgccagaatcaaaccagttgccttgcaaattgaacatcatccatatcttgtgcagcagaaattaattgagtatgctcaatctgaggacattgtggtagttgcttactcttcctttggaccgcaatcattcctggaattgaaggttaacaaggctttgactgctgtttctttgtttgagcatgatgtcattaagaagatcgcacaggcccacaacagatctgccggagaagtccttctgagatgggctacccaaagaggtctagcaattatacccaaatcgagcaagccagagcgtctcagttccaacttgcacatcaactcatttgacttgaccaaggaggatctggagactatcagttcattagaccttggcttacgattcaatgatccatgggactgggataaaattccaatctttgcttaa

SEQ ID NO: 3972 - DNA, 666 bp, Artificial Sequence
  Optimized genes for Pichia pastoris
atgtctgaaacttacgatgagcaagttgttgctgagcccgtggaagttcaatatgttgagctttcaaccaagattccagctgatatccgtgaaggtgccgaagagatcaagctgttcaacaaatggtctttccaagatgttactgtcaaggacatttctttgactgattacattcagatcagacaacctgtgtttgtttcccacactgctggtaagtatgctgccaagagatttagaaaggctcagtgcccaatcattgaaagattgaccaattcattgatgatgaacggtaggaacaatggaaagaagttgttggctgtcagaattgttaaacatgctcttgagattatccacgttctcactgaccagaacccattgcaagtccttgtagacgccattgtcaacacaggagctagagaagatagtaccagagttggttccgcaggcgctgttagaagacaggcagtcgacgtatcgcctctacgacgtgtgaaccaagctattgccttactgaccattggtgctcgtgagtctgctttcagaaacatcaaatccattgctgaatgtctggcagaggaattaataaatgccgccaaaggatctagtacaagctacgccatcaagaagaaagacgagttggagagagtcgcaaagtccaatcgttaa

SEQ ID NO: 3973 - DNA, 1449 bp, Artificial Sequence
  Optimized genes for Pichia pastoris
atgtttgctagattgcatgccaaacgtggatggaagtcattggccagggcacgagttggttccagattcctctccaactctagcatagcacgagccgctcaaaccaaagacaacaacgacttctatgacgtgaaaacaaagaagaacgattttttcccagttcaagttgatggtattgagtcttcgcttggtaagtatgaagagtttgccaaggatgctcatgaatgggaatcatggaatttgcaaaatgaagaccacccagaatatcctgtcaagagaaccaagatcagacacttcaccttaaacttcggtcctcagcatccagctgcccatggtgttctgaggctgatattagaacttcacggtgaagaaatcctccgctctgatcctcacgtcggtttgctccacagaggaacagagaaactgatcgagtccaagacttacatgcaagctctgccttacttcgaccgtttggactacgtctcaatgatgactaacgagcaggttttcagtctggccgttgagaagctgttgaacttggaggttccagagagaggtcaatacattaggacgctatttggtgagattaccagagttttgaatcatctgatgtctgtcttgtctcatgctatggatgttggagctctaacaccattcttgtggggttttgaggagagagaaaaattaatggaattttacgaaagagtctcaggggccagattgcactccgcttacgtcagaccaggtggtgtctcccaggatttgcctgctggtttactagatgacatctacatgtgggctactcaatttggagacagacttgatgagactgaggaactacttactgattctagaatttggaaacaaagaactattggtatcggagaggtcaccgctgaggatgcacttaattacggtctttcgggggtgatgttgagaggtagtggcgttccttttgatattagaaagtctcagccatatgatgcctacgacaaggtcgactttgacattgcagtaggtactaagggtgactgttacgatcgttatttgatcagaatgaccgaattcagacaaagcctgagaatcatcgaacagtgctgtaaccaaatgccaccaggacccgtaaaagtggaagatttcaaggttgctccacctccaagagctttgatgaaggaggacatggaggctttaatccaccactttttgttgtacactaaaggatatgcagtaccggcaggtgagacctacacagctattgaagctcctaagggagaaatggctgtttatgttgtgtctgacggatccgagcgtccatacagatgtaagattcgtgcccccggtttcgctcacttgggtgctttcgatcatattgcccgtggccatttccttcctgatgctgtcgccattattggaactatggacttggtgtttggcgaagttgaccgttaa

SEQ ID NO: 3974 - DNA, 2517 bp, Artificial Sequence
  Optimized genes for Pichia pastoris
atgattgacgagaagcaattgaaccaaccaaagagatcggtattgagaagattgcacatgttgtttttaccattacttgctatctctttctttttgatctacctgtcagacattacccaacctcttttcagggctcgtaaggaggatgagaacccattggagatttatcttaaggcattagaaactaatgaggcccacaagtggtccaaagtgtacacctcacagccacatttggccggaaccaactacggattggtcgagttcactaagtctaaatttgaagaatatggtttcgaggcttccgtcgacgactatgatgtctatctgtcttatccaatcgaccactccctggaactttacgagcactctgaggacaagaatgacaaattattgtacaaagcatcgctacaagaagatgttctttccgaggatcccacaacaagtggggatgacttgattccaacttttctaggctatggagcaaacggtaatgtctctgccgaatacatctatgcaaattacggtaccaaggaagatttcgaagacttagttgccagaggtgtccccatcaagggtaagattgccgttattagatacggtcaaattttccgtggtttaaaggttaagttcgctcaagagtacggtgccattggtgctgttatatattctgatccaggtgatgattacggtatcactccagagaatggctacaagccatacccacacggtaaggctagaaacccttcctccgttcaaagaggtagtgcccaattcttgtctgtttaccccggtgacccgacaacgcctggtgtgggcagtaagaagggtgttgagagagtcgatcctcatgccaccaccccatctatcccagttttgcctttgtcattcaaggatgctttgccgatccttaagaaactaaacaaggaaggtttgagtgttcctgattcttggaaaggtggtttggagggtgttgactactctactggaccagctaaaaacattcatctgaatctgtactcagaacagaactttaccatcacccctatttacaacgtttatggtgaaatcaagggagaaaacgctgacgaagtaataataatcggaaaccacagggacgcttggattaagggaggtgcatcggaccctaactctggttccgctgctctgattgaactgagtcgtgggttacacgctcttacgaagaccggatggaagcctcacagaactatcgtcctagcatcatgggatgctgaagagtatgggctaattggtagcactgagtttggtgagcaatttgagaagtttttgcagaagaaggtcgtcgcctacttgaatgttgatgtggccgtagcgggcacccacctgcatttgggagcttctccatccctttttaagcttcttaaagataatgccaaagaaattactttcaagaactccacagagactttgtatgacaactatgtcaaggaccatggtaacgatattatttctaccttgggtagcggaagtgactacacagtgtttcttgatcatctcggtattccttctctggatatcggtttcattgctggcaaaggggatccagtctaccactaccattcaaactacgactcttaccactggatctccacttctggagacccaggttttgagtatcacaatgtgttggcaaaataccttggttctttggttctgaacctgtccgaacgtgaagttttatacctcaaacttcatgattatgccactgaattgctaaaatatctattggaagcttatgctcagatgcctgaggaatgggacgatgaagtcattggattcagatcttcttcatgtcatagagctaaggcctctcaccatggtaaggacccccatcatgaaggtagacgtcaccacggtaaaggattccactcaaagggtggtccacatcatggcgaaagacaccatggaaagggatttcatgctgagggaggacctcaccacgagaaaggcccacaccacgagaagggtcttcacgttgaaggagagccacatcaccaaaaaggtcctcactttgaaaagggcttccatcacgacatggaaatgtaccataaaaaattggctcaccacggaaaagagcctaagacaaagttgaagcacttgaagaagcaggtggagtctttaatcatcgattttgctaacaccactcaaacttacgatgcttacactgacttcctccagaaacagcatgagatcagagattcgctctccttctgggaaaaaataaagttacatttcaagatcaaagctgccaacttcaagctgaagtactttgagcgtgttttcctgcacgaaaatggactcaagaacagagaatggttcaaacatattgtttacgccgctggtcgcaatactggttacgctggtcagcgattgccaggactggtagaggcaattgaggacaagaacttgcatgacgccgtcaaatggttgcacattttgtccaagaagattgattcattgcaaaagtccttagagtaa

SEQ ID NO: 3975 - DNA, 2667 bp, Artificial Sequence
  Optimized genes for Pichia pastoris
atgtcaactgctgctcctatcaaagaagagtcccagtttgctcatctgacgctaatgaacaaagacatcccttctaatgctaagcaagccaagtccaaggtttccgctgctccagctaagaccggatccaaatctgctggtggttctggtaacaacaacgctgccccagtcaagaagagagtcagaaccggttgtttgacatgcagaaagaagcacaagaaatgtgacgagaacagaaacccaaagtgtgatttctgtactctgaagggactagagtgtgtctggccagagaataataagaaaaacatttttgttaataactccatgaaggacttcttggggaagaagacggtagatggtgctgattctctgaatctagctgtcaacttacaacaacagcaaagtagtaacactattgccaaccagagtctgtcttcgattggtttggagtctttcggttatggttcaggtatcaagaatgagttcaacttccaagatttaataggttccaactctgggtcttctgatcccactttttctgttgatgccgatgaggctcaaaagttggatatctccaacaagaacagtaggaaaaggcagaagctggggctgctacccgtgtctaacgccacctctcatttgaacggtttcaacggtatgagcaatggaaagtctcactctttttcatcaccatcgggtactaacgatgacgaactttctggactgatgttcaattccccatcctttaaccctttgactgtgaatgactctactaataattcaaaccataatattggcctttcacctatgtcatgcttgtttagcaccgttcaagaggcatcgcagaaaaaacacggtaactcctctcgtcacttctcttacccttccggccctgaagacttgtggtttaatgaatttcaaaaacaggctttgaccgcaaatggtgagaatgccgtccagcagggtgatgatgcttccaagaacaatacagctatacctaaggatcaatcttccaattcgtccatcttcagttccagatccagcgcagcctccagtaatagtggtgacgatattggaagaatgggtcctttttctaagggccccgagattgaattcaactacgactcatttttggaaagtttgaaagctgaatctccatcttcctccaagtacaaccttccagaaactttgaaggaatacatgaccctctcctcgtcacatttaaattctcaacactccgatacattagccaatggtaccaacggaaattattcttcgacagtttctaacaacctgtcgttgtctttgaactcattctctttttctgacaaattttccttatctcctccaactatcaccgacgccgagaagttctcattgatgagaaatttcattgacaacatatctccatggttcgatactttcgacaacaccaagcaatttggaactaagatcccggtcctggcaaaaaagtgctcttctttatactacgctattctagccatttctagtcgacaacgtgagagaatcaagaaggaacataacgagaaaactttacagtgctatcaatactctcttcagcaattgattcctactgtccaatcatccaacaacattgagtatatcattacctgcattttgttgtccgttttccacatcatgagttctgaaccaagtacccaaagagacattatcgtgtctttggccaagtatattcaagcttgtaacatcaacggatttacaagcaacgacaagcttgaaaagtcaattttctggaactatgtgaacttggacctcgccacttgtgccatcggtgaagaatcaatggttattccattttcctactgggttaaggagaccactgactacaaaacaatccaggatgtaaagccattcttcaccaaaaagacttctaccaccacagatgacgaccttgatgatatgtatgctatctacatgttgtacatttccggtagaattattaatttgcttaactgtcgtgatgcaaagttaaactttgagcctaaatgggaattcctttggaacgaattgaacgaatgggagttgaataaaccattaaccttccagtctattgttcaattcaaggctaatgatgaatcccaaggtggctcgacgttcccaaccgtactctttagcaatagccgctcttgttactcaaaccaactgtaccacatgtcgtacatcatcttggttcagaacaagcctcgtctttacaagattcctttcactactgtttcagcatctatgtccagtccgtcagacaataaggccggaatgtctgcctcttccactccagcatccgaccatcatgcatcaggagatcatctcagtccaagatctgtcgagccatcactttccacaactctttctccccctcctaacgctaacggagctggaaacaagtttagaagcacactatggcatgctaaacaaatttgtggtatttccattaacaataaccacaattcaaatcttgctgcgaaagttaacagcttgcaaccattgtggcacgctggtaagttgatctcttctaaatcagaacacactcagttactgaaattgctgaacaacttggaatgtgctactggatggccaatgaactggaagggtaaagagctgatcgactattggaatgttgaggagtaa

SEQ ID NO: 3976 - DNA, 315 bp, Artificial Sequence
  Optimized genes for Pichia pastoris
atggctctttttgactcgatctccaatgttgtcaaggaccaattgaaagacaaggaagcatcctcaaaagacacttctgccaccgaagcctctaccaagggagaagaaccaaagaagactgaggaggccaagaagcaagagattgaaggttacacacaggatttgaaggatattgctgctgccgtgcagaaaggtgatttcaagggtatccaaaaagaagtttctgagctggcaggtaacaagcagtttcaagctgatgctaaggagtatgcttctaaggctttctccaagaaagagggaggcagttcagcttaa

SEQ ID NO: 3977 - DNA, 1827 bp, Artificial Sequence
  Optimized genes for Pichia pastoris
atgtcttccaagcactgggactacaagaaggacttggtattgtctcacttggctggtttgtgccaatccaaccctcacgttcgactgattgagtctgagagagttgttatatcagcagaaaaccaagaggataagattaccctgatctccggcggtggtagtggccatgaaccattgcatgctgggtttgttactaaggatggtctattagacgctgcagtcgctggtttcattttcgcttctccgtcgacgaagcagatcttttctgctatcaaagcaaaaccttcgaaaaagggaactttgatcattgtaaagaactatacgggtgacattctgcattttggtctagcagcagagaaggcaaaagctgaagggttgaatgctgagctattgatcgtccaagacgatgtttccgtcggtaaagccaagaatggtttagttggtagaagaggtctcgctggaacatcgctcgttcacaaaattctaggcgcaaaggcttacttgcaaaaggacaatcttgagttgcaccaactggtgacatttggagaaaaagtggtagccaacttggtcactatcggtgccagtctggaccatgttaccattccagctcgtgccaataagcaggaggaagatgactctgatgatgagcatggttacgaggttttgaaacacgatgaatttgaaattggtatgggtattcacaatgaacccggtatcaagaagtcttctcctatcccaactgtggatgaattggttgcagaattattagaatatttgctttctaccaccgataaagacagaaactacgttcaattcgacaagaacgacgaagttgtccttcttatcaacaatttgggaggaacctccgttcttgaactttacgccatccagaacattgtcgtcgaccaattggcctccaagtattcaattaagccagtcagaatcttcactggtactttcaccacttcattggatggtccaggattttccattactctgctgaatgccaccaagacaggtgacaaggatattttaaagttcttggaccacaagacttccgctcctggatggaactccaatatctctgactggtcagggcgtgttgacaacttcatcgtagctgctccagagattgacgagggagattcatctagcaaggtctctgttgatgctaagttgtatgctgatttgttggaatccggtgtcaagaaggttatttcaaaagagccaaagatcaccttatacgacactgttgccggtgatggcgactgtggtgaaactcttgcaaacggttctaacgccattttgaaggcccttgctgagggtaagctggatctgaaagacggagtgaaatctttggtgcagattacagatatcgttgagacagctatgggaggtaccagcggtggattgtactctatatttatatctgccttagccaaatcactaaaggaaaaggagctttcagaaggtgcttatacattgactttggagactattagcggaagtcttcaagctgctctgcaatctttgttcaagtacactcgtgccagaaccggtgatagaactttaattgatgcgctagagcccttcgtcaaggagtttgctaagtccaaagatctcaaactggctaacaaggctgcccatgatggagctgaagctaccagaaagttagaggctaaattcggtagggcttcctacgtggccgaagaagagttcaaacagtttgagagtgaaggaggccttcctgacccaggtgctattggactggccgctttgatttctggaatcactgatgcctacttcaagagtgagaccaaattgtaa

SEQ ID NO: 3978 - DNA, 1062 bp, Artificial Sequence
  Optimized genes for Pichia pastoris
atgtccaacaacaccacccagaatctagcagagcaaaagggtattcaaactgacttagtaactttgactagattcattttagatgagcagaaaaaatctgctccaaacgccactggagaactaacgcttttactgaactctttgcaatttgctttcaagtttatagcacatacaatcagaagaagtgaattggtcaatcttataggcttggccggtgtcaccaacgctactggtgatgaccagaagaagttggacgtcattggagatgaaattttcatcaatgctatgaagggatctggtaatgtcaagctgttggtttctgaagaacaagaggacttgattgtttttgagtcttccaaaggaaactacgccgttgtctgtgatccaattgacggttcttcgaaccttgatgctggcgtgtctgttggtactatttttggtgtttacaagcttcttcctggatcagcaggcagcatcaaggatgtactcaggtcaggaactgaaatggtggctgctggttataccatgtacggtgcttcttctcatttgatgcttacaacaggaaatggtgttaacggtttcactctggacaccgatttgggtgagtttattttgacatatccttccttgaaaattccacacactcgtgccatctactcaattaatgaaggtaactcccactactggactgatggtgtcaacgagtatatcgcctcactgaagaaaccacaagccaacggtaagccttatagtgcccgttacattggttccatggttgctgatgttcacagaaccttactctacggaggtatcttcggttaccctgcagactccaagtccaaaagtggaaaattgagagtcctgtacgagtgcttcccaatggctcttttgttggagcaagctggtggtgaagctgttaatgacaagggcgaaagaatcttgaacctggagccaaagcaagttcatgagagaagcgggatctggttgggatcgaaaggtgaggttgaacgattactaccctatctgaccaagaagattaagatccagtctgtgaacttgtaa

SEQ ID NO: 3979 - DNA, 1095 bp, Artificial Sequence
  Optimized genes for Pichia pastoris
atgaaggctctgatcctcgtggggggctatggtacacgattaaggcctttaacactttcggtcccaaagccattggttgagtttgcaaacaaaccaatgatttttcaccaagtcaaggccctagcagaggccggagtaactgatatcgtgctggcggtcaactacaagcctgaagttatggttggcgccttgagagagtacgagaaagaatgtggtgtgaacattaccttttctgttgaagaggagcctttgggaactgctggtcctctgaagttggctgaatctgtccttacaaagaatgatgagccaattttcgtcctcaattcagatgtcatctgtgactacccattcaaggatcttgctgctttccataaagcacatggtgctgaggctactatcgttgctaccaaggtagacgagccctccaagtacggtgtcattgttcacgacagagatattcctaacttaattgaccgttttgtagaaaaaccggtggaatttgttggtaacagaatcaatgccggtatttatatcattaacccatccgttataagtttgattgaaatgagaccaacctccattgagaaggagaccttcccactattagtcgaaaagaagcaattgtactcttatgacttggagggttactggatggatgttggccagccaaaagacttcttgtctggtacctgcctgtatttgtccagccttgccaaaaaggaacgttctgctttgactcctacttctgaacctttcataaatggaggaaatgtgttgatcgatccaactgccaaggttggaaaggactgtaagattggacccaatgttgttattggtccaaactgtgttatcggtgatggtgtcagaattcaaagaagtgtgattttgaagaactccaacatcaaggatcatgcttgggttaaatcaactattgtcggatggaactcaacggtaggaaaatgggctagattggaaggtgttaccgttcttggtgaggacgtcactgtcaaagatgaaatttacgttaatggtggtaaggtcctgcctcacaagtctatctctgccaacgttgacactccacagatcatcatgtaa

SEQ ID NO: 3980 - DNA, 1098 bp, Artificial Sequence
  Optimized genes for Pichia pastoris
atgaagattgtcctggtgttgtactctgctggaaaacatgctgccgatgagccaaaactttacggatgcattgagaacgagcttggtatcagacaatggttagaaaagggtggtcatgaactagtgacaacctctgacaaggagggtgaaaactctgaacttgagaagcacatccctgatgctgacgttatcatttccaccccattccatcctgcttacatcaccaaagagcgtatacagaaggctaagaagttgaagcttctggtcgttgccggtgttggatcggaccacattgatttggattacattgaacagaacggtttggacataagcgttttggaagttactggttcaaatgtggtttccgtagcggaacacgttgtcatgaccatcttgaacttggtcaggaactttgttccagctcatgagcaaattgttaaccacggatgggatgttgcagccattgccaaggacgcctacgacatcgaaggtaagactattgctactattggtgcaggtagaatcggttacagagtcttggagagactagtagccttcaaccctaaggaattgctgtactacgattatcaaggtctgcccaaagaagcagaagagaaagttggtgctcgtcgtgttgacactgttgaggagttagtagcccaggcagatgtagtcaccgtgaatgctcctttgcacgctggtactaaaggcttagtcaacaaagaactgctcagtaagttcaagaaaggagcttggttggtgaacactgctagaggtgccatctgtaatgcacaagatgtggctgatgccgttgcttctggtcaactgcgaggctacggtggagacgtctggttccctcaaccggctccaaaggatcatccatggagagacatgagaaacaagtatggatatgggaatgccatgactccacactactccggcacaactcttgacgctcaagtcagatatgctgagggaacaaagaacattctcaattcatttttaaccaagaagtttgactatagaccacaggatgtcattttgttgaatggaaagtacaagacgaaagcctatggtaacgataaaaaggttgcttaa

SEQ ID NO: 3981 - DNA, 747 bp, Artificial Sequence
  Optimized genes for Pichia pastoris
atggctagaactttcttcgttggaggtaacttcaagatgaacggctcaaagaagtccattcatgagatcattgaaaggttgaacaacacgaaattgccagaaaacgttgaagttgtgattgctcctccagctccatatcttcaacaagcagtcactgagaataaacagaagactgtttacgtttctgctcaaaattcgtttgacaaagcaagcggggcttacactggtgaggtgtctgtagaagctttgaaagaccttggcgtaccttacgtcattttaggtcactctgagagaagaaccatcaacaaggaagatgatgctttcattgcctccaagaccaagtttgccctggaccaaggtttaaaagtgatactgtgtattggtgaaactttggaagaaaagcaagccaacatcaccctggatgttgtcaagagacaattgcaagctgtcgttgacgtcgtaagtgactggaccaacattgttgttgcctatgagccagtctgggccattggaactggacttgctgctacaccctctgacgctcaggatgtccacaagcagatccgtgattttttggccacagtcatcggaaaggaccaggcagagaaggttagaattctctacggtggatccgtcaatggtaagaatgccgttgagttcagagacaaggctgatgtggatggtttcttggttggtggtgcttcactaaaacctgagtttgttgatatcatcaattctcgtaactaa

SEQ ID NO: 3982 - DNA, 1029 bp, Artificial Sequence
  Optimized genes for Pichia pastoris
atgattgttcactctcctatagtaacacgaaggctggccacttctgctcgtgtccctataaggacgctcgcaacctcttctaacgggcttaactttttccagaagactcaattgccggccaacaccatcatcagattcgttcctcaacaaacagcttggattgtcgagagaatgggtaagtttcatagaattcttcagccaggtctggcaattttattacctttcttggacaagattcaatatgttcaatcattaaaagaaaatgccattgaggttccatctcagtcagccatcacctcagacaacgttacgctggaaatggatggtgttctgtatatccgtgtggttgacgcttacaaggcttcctacggtgtcgaaaacgccgagtacgctattagtcagctagctcaaactaccatgagatctgagattggtcaactgactttggatcatgtgcttcgtgagagacaatctttgaacgtcaacatcactgctgttttgaatgatgctgctaaagactggggtatccaatgtttgagatatgaaattagagatatccatccacccagtaatgtcttggaggccatgcaccgtcaggtatccgctgaaagatccaagagagctgagatcttagactccgagggtcacagacagtcggcaatcaacattgcagaaggtgaacgtcaaagccagattctagcgagtgaggctaccaagttcaagcaaatcaatttggccgaaggagaagctagagccattttgttgaaagctgaagccacttcaaaaggtattgaacaaattgccaatgctatcagaaacactccaggaggaggcgatgccgtgtcgttgcaagttgctgagaagtacgttgatgcatttggaaagcttgcaaaagagtcaaatactatcgtcattccagctggtttgggtgatgtcagctcttggatggcttctggactctccatttaccagaatcttcaaaagtccaacgctacaaaggaccagaacaagatcgaagagaccaaataa

SEQ ID NO: 3983 - DNA, 1548 bp, Artificial Sequence
  Optimized genes for Pichia pastoris
atgtctttggtccaggaactcattcaaaagatttcttccttagaattgactttggttgagaagctgagcatcttgttcgttgctccattccttttgaacgctttgtggcaatttatctactctttccgtaaagacagagtccctctggttttccactgggttccatgggtcggttccgctgtcacatatggtatgcaaccttacgagttctttgctgattgtcagcgtaagtacggtgacgtgtttgctttcgtactgttgggcaaggttatgaccgtttacttgggtcctaaaggtcatgaattcatccttaatgccaagttgaatgatgtttgtgctgaagatgcatataagcacctcaccactcctgtttttggtgaaggtgttatttacgactgtccaaactggaagcttatggaccagaagaagtttgtcaagggatctcttactaaagagtcttttcgatcatacgtcccaaagatcagagatgaggttttggattatattaacaacgaccccaacttcatgggtggagattccaaaaagaagactggtaagaccaatgtgctgaactctcaatctgagctgacaatacttacagcgtctcgtagtttattaggtgatgacatgagaaaactattaaccaagaaatgggccaaactgttttcagacttggacaagggtttcacccctctcaatttcatttttagccatttgccacttccgtcttactggactcgtgatcatgctcaaaaaaccatctctgaaacctatttgtccttgatcaacaagagacgtgcaaccaacgatattggagacagggatctgattgacagcctgatgaagtcttcaacttacaaggatggttctaagatgacagatgaagagatctcccatttacttattggcgtattgatgggaggtcaacacaccagtgcatcgacatcatcttggttcttgttgcacctaggagaaaagccagagttgcaagaggaattatttgaggagcaagaaagagttctgcagggtagagagctaacgtatgacgatttggccaacatgccactacataaccaggtcatcaaggagacattgagaatgcacatgcctttgcatagtattttccgcaaagtcactaggccccttcccgtaccgaattcaaaatatgtggtacctaagggccactacgttcttgtctctccaggttttgccatgactaatgacgcttacttcccaaatgcttctgacttccaaccacatagatgggacgagactgttgaaccagtttccgccgatgctaaggaaactgtcgactacggatttggaaaagtgtccaagggtgtctcctcaccatatttaccatttggggggggaagacacagatgtattggtgagcacttcgcctactgccaattgggaactattttgaacacttttgttagaactttcaagtggaaagctgttgtgccacagcctgattacacttccatggttaccttgcctgaacctaacttgagtacgataacctgggagagaagagacaactaa

SEQ ID NO: 3984 - DNA, 1671 bp, Artificial Sequence
  Optimized genes for Pichia pastoris
atgactctttccaacaatacaaaaagaagagaaagttcaatcactcctgatcaacagaaattgattgagaaatatttggagaagaagaacgtccatcatcagaagaagttacagcacgtcacccacacttccactaatgtcaatctttcgtcaatcaaatggaagtcattgaggcttgaggactgtggtgtttcgattcctgactctggtcttcccgccaagatcgcttatgagagtatacatgattctctaaatttggatggtaacccaacattgaatctcgcctcctttgttaacaccggttacatcaacgattatagtgagccattgatccatgaaaatttagtcaagaacttggctgacaatgacgagtaccctgtgatgttggaattgcacgagagatgtttgcaaatgttaacagagttgtggaacggtgattccaaaaagagcatcggatctgcgaccactggctcctccgaagctatcatgctgggtggtttagccatgaagaaaaactggcaaaccaagagacgtgctgctggtaagtccaccgaaaagccaaacattataatggcttcttgctgtcaggtagcattggagaagtttgccagatattttgaagttgatgctagaatcatttcttgtgacaacaacgactacattctcgactatgatcttatttacgatgcatgtgatgagaatactattggtattttcgttattttgggcagtacttacactggtgcctttgaagatgttgctctagtcaacaagattcttgatagggttgagaaggaaaagggtttcgacatccctatccacgttgacggggcatcgggagctttcgtcgctccattcatttatccagacttggaatgggacttccgtgttccaagagtcaaatctattaacacatcaggacacaagttcggtctggtcactgccggtttgggttggatcgttttcaaggacaaggagtggttaccaaaggatttggtatttgagctacgttacttgggaggcttagaatattccttcactttgaacttttccagaccaggtcaccaagtcattcatcaatactttaacttcgtggccctaggaaagaatggatacagtagcatttttgatacttgtttaaccaatgctcgtttattgtcttcatttctggaagaaactaactacttcaaagtcgtatcaaacgttcaccgccccgttgaagcaggaaccacacctcatgctgatgatcatttggccttccatccatctctacctgttgtgtctttccaattcaacgaagagttttccaagcagtacccagaaattcctcaatccattataagcacgctgatgagaaacaaaggatggattattccaaattaccccctgccgcgtaccaccaaacctgtgaaagatgacgaaagagagatcttgagagttgttgtcagatacaacctgacgctggagctgcttcaaaagttgatgtctgacattgtttctacactcactgttttgaccaactcttgcaagctgatccgagagtctctgaataatgatgcccttgaagacactgatatcatctacgacatgcttttgtcaattgctttggacggttctgagaaccttgtgaagtcttctatcaaggaccacaaacacgctggtgcttgttaa

SEQ ID NO: 3985 - DNA, 1140 bp, Artificial Sequence
  Optimized genes for Pichia pastoris
atgtcaactgaaggccaaattattaagtgcaaagccgctgttgcttgggaggctggtaaagatctttcaattgaggagattgaagttttacctccaagagcccatgaggtcagagttaaggttgaatttacgggtgtttgccacactgatgcttacactttgagcggggccgacgctgagggttctttcccagtcgttttcggtcacgaaggtgcgggcgtagtcgagtccgtcggtgagggagttgagagtgtcaaggttggtgactctgttgttctactttatacacccgagtgtcgtgaatgtaagttctgtttgtctggaaagaccaacctatgtggtaagattagagctacacagggtaaggggttactgcctgatggtacttcccgattcagatgtaaaggcaaagacctgttccactacatgggttgctcctcgttttcgcagtatactgttgtggccgatatttctgtggtcaaagttcaggatgaagctccaaaggacaagacttgtttactcggatgtggagtaacgaccggttacggtgcagccatcaacactgccaagatctccaaaggagacaaaatcggtgtctttggtgctggatgcattggtctgtctgtcatccaaggagctgtatccaagggtgccagtgagatcatcgttattgacattaatgattctaagaaggcctgggctgaccaattcggggcaaccaagtttgtcaaccctaccactcttcctgaaggaactaacattgttgattacttgattgatatcacagacggtggtttcgactacacctttgattgtactggaaatgtgcaggtcatgagaaatgctttggaatcttgtcacaagggatggggtgaatccattatcattggagtagctgctgccggtaaggaaatttcaaccagaccattccaattggtgacaggccgtgtttggagaggttgtgcttttggaggtatcaagggtagaactcaaatgccatctttggttcaagattatttggatggaaaaataaaagtggatgagttcatcacccatcgtcatgacttggacaatataaacaaggcatttcacgacatgcacgctggtaactgtatcagggcagtcattaccatgcattaa

SEQ ID NO: 3986 - DNA, 399 bp, Artificial Sequence
  Optimized genes for Pichia pastoris
atgtctgagaccagtgccccaagacctactatcgtcaagaaatacactaagaagttcaagcgtcatcactcagacagataccacagagttggtgaatcttggagaaagcagaaaggtattgattcttgtgtgaggagaagattcagaggtacaatcagacagccaaagattggatatggcagcgacaagagaaccaagtacatgcttaaatccggtcacaaggcatttgttgttaacaacgccaaagaactggatgttctactgttacacaatcaacaatatgctgctgagattgctcatgctgtatcatccaagaacagagtccatattttggccagagcaaaagagttgggtatcaaggtcactaatcctcaaggacgtttgaacttggaagcttaa

SEQ ID NO: 3987 - DNA, 651 bp, Artificial Sequence
  Optimized genes for Pichia pastoris
atgtctcaaggtaccatctacttggtattggcctctcctcgtagtagtctattcaaggacctcattgaatactacggattggacatcaagatttctgacacttcagatccggaatttgccaagactttcccactgaagagaactccatcattcaagggtcctgattttgttctgcatgaggctcttgccattttcgtctacattacctcgcttattcctcagaaccacggtctttatggatcatccaatctagactacgctcaaacaatcaaatggttatctttcactgcaagcgagatcatatccgggctcgtccaagctctgtatcctctgattggtaacttgccatattccaaggatggtgttgaccaggcgttaaaagacttggagtcttacgttgccgtgtatgaaacacaattgaagcaaaccaagtacttagttggtgacaagatcactttggctgatttgtttgctgtgcagtccatcagatggggtttacaatacatctgggatgtcaactggttgaaacagcatccattgattgatgcttggttcaaagatgttacccagcacccaattattgtcaagtctttgggcgactttaaacctttgcaaaaggcacttcccaatgctccaccaaagggaaactaa

SEQ ID NO: 3988 - DNA, 1233 bp, Artificial Sequence
  Optimized genes for Pichia pastoris
atgattttcgacggaaccaccatgtctattgccattgggctgcttagtactttgggtatcggtgctgaggctaaggtccattctgccaagatccacaagcatccagtttctgaaactctaaaagaggccaattttggtcaatatgtgtcggctttggagcacaaatacgtatctttgttcaacgagcagaacgctttatcgaaatcaaatttcatgtcccaacaagatggtttcgccgttgaagcttctcacgatgctcctttgaccaactacctgaatgctcaatacttcactgaggtcagtcttgggactccacctcaatctttcaaggtaatattggacaccggttcctcaaacttgtgggttccctccaaagattgtggttcattggcctgctttttgcacgccaaatatgatcatgacgagtcatcaacttacaagaagaacggttcttcttttgagatcagatatggtagtggatccatggaaggatatgtgagccaggatgttctgcagatcggagatttgactattccaaaggttgactttgcagaggcaacgtctgagccaggtctcgcatttgccttcggtaagtttgatggaatattaggccttgcatacgattcgatctccgtcaacaagattgttccaccaatttacaaagctcttgaacttgatcttttggatgagcctaagttcgctttctacctaggtgatactgacaaggatgaatctgacggtggtttggctacttttggaggtgtcgataaatccaagtatgaaggtaaaattacatggttaccggtcagaagaaaggcttactgggaagtttcctttgacggtgttggtctgggctccgaatacgctgaattgcaaaagactggagctgctattgacacaggcacatccttgattgctctcccttctggtcttgccgaaattttgaatgccgagattggtgccaccaagggatggtctggacagtatgctgtggactgtgacactagggattcattacccgatctgacactaacgtttgctggttacaactttaccatcactccttatgactacaccttagaggttagcggatcttgtatcagtgcattcaccccaatggacttcccagaaccaatcggtcctctggcaattattggtgactccttcttgcgtaagtactactctgtttacgacttgggaaaggacgctgtcggcctggcgaagtctatctaa

SEQ ID NO: 3989 - DNA, 804 bp, Artificial Sequence
  Optimized genes for Pichia pastoris
atgctgactcatacagtcttacgtgctggtaccaagagaacttgcagcacgctgtccgttgtgcgagggcttgctaccgtttctcaaaaccaaccaagattgaagtctttcaaggtttaccgttggtctccagacactccagagatcaaaccacatatgcaggagtacaagattgacttgaacgagtgtggtccaatggttctggatgctttgttgaaaataaagaatgaacaagatgccacactcactttcagaagaagttgcagagaaggtatctgtggatcttgtgccatgaacattggtggaagaaacactttagcatgtctgtgtaagatcgaccagaacgaatctactgaactgaaaatctaccctcttcctcacatgtttgttgtcagagacctagtgccggatttgacccacttctacaaacagtataagtccattcaaccttttttacaaagagattcagtcccttccgatggtaaagagaacttgcaatctattgaggacagaaagaaattggacggcctatatgaatgtattctctgtgcttgttgttccacctcatgtccatcttactggtggaaccagcaagagtatttgggacccgccgttttgatgcaagcttacagatggttgattgattcgagggatcaggcatccgtagctcgtaaggagatgcttcagaattcaatgagtctttatagatgtcacactatcatgaattgcgcccgtacctgcccaaagggtttgaatcctggtaaggctattgctgaaatcaagaagcaattggcctttgactaa

SEQ ID NO: 3990 - DNA, 1212 bp, Artificial Sequence
  Optimized genes for Pichia pastoris
atggctggtgctaccagaatcaactccagagtcgtgaggtttgctatttttgccagtatattggttttacttggattcatcttatcgagaggttctgccacttcctattcacttcccagtggcctaacttcagatacgtctcaatctaccggttcctctccaaaatctgagtcaaaaccaagctcgcagggatcatcaggagctactgagctgaagaagacttacaccactgacggaaaggaaaaggcaactttcgtctcccttgctaggaattcagacgtctggtctttggcttcttccattcgtcacgttgaagacagattcaaccacaagttccattatgactgggttttcttgaacgatgaggagttctctgatgaattcaagcgagtaacctctgctttgacttctggtaaggctaagtacggtttgattcctaaggagcactggtcattccctgaatggattgacaaggagcgtgctgccaaaactcgtaaagaaatggccgccaagaaggttatttatggtgattctatctcttacagacacatgtgtcgttttgagagcgggtttttcttcagacatgaattgatgcaggagtatgaatggtactggcgtgtcgagcctgatatcaagatttactgtgatattgattacgatgtgttcaaattcatgaaagacaacaataagatgtacggctttacagtgtcgcttccagaatacgttgccaccattgaaactttgtgggatacaacaagagcctttatcaaagagaatcctcaatatctaccggaagataatatgatggatttcatttctgacgatgatggtctgtcctacaacggttgccacttctggtccaactttgaagtaggatccctcagtctgtggagaagtgaggcctatctgaaatattttgaccatttggacaaagcaggtggttttttctacgagagatggggtgacgctccagttcactccatcgcagcagcgttatttttgcacagagaccaaatccatttctttgatgacgttggatactttcataacccattcaataactgtcctgttgatgctgacttgagagaggaaagaagatgtatgtgcaatcccaaggacgactttacctggaagggttactcttgtgttccagagtttttcaccgtcaacaacatgaagagaccaaagggatgggaagctttctccggttaa

SEQ ID NO: 3991 - DNA, 612 bp, Artificial Sequence
  Optimized genes for Pichia pastoris
atgaactctgagtacgactatttgttcaaactacttctgatcggagattccggtgttggtaaatcttgtttactgctccgttttgctgaagacacttacacccaagattacatttccactattggtgtcgatttcaagatcaggacaattgagttggatggtaagaccatcaaacttcaaatttgggatactgctggtcaagagagattcagaaccataacgtcctcttactacagaggtgcccacggtatcatcattgtttatgatgtcactgaccaggaaagctttaacaatgtaaaccaatggttgcaagaaattgacagatatgcaacagggggagtgatgaagttgctggtgggaaataaatcagacttgaaggacaagaaggttgttgactacactgttgccaaggagtttgccgatgctttggagattccattgattgaaaccagtgcacttgactctaccaacgttgaacaagctttcttcaacatggctagacagatcaagtctcaaatggtcaacaaccaggccggctcgggaactgagaaggcttctatcaatttacgtggacaatctgtcggtggttcccagaattcatcatgctgttaa

SEQ ID NO: 3992 - DNA, 1131 bp, Artificial Sequence
  Optimized genes for Pichia pastoris
atggatggtgaagatgtcgcagccctcgtcattgacaatggatccggtatgtgtaaggctggatacgccggtgacgatgctccacacactgttttcccttccgttgtgggccgaccaagacaccaaggtgttatggttggaatgggtcagaaggactccttcgtcggagatgaagctcaatccaagagaggcattctaactttgcgttacccaattgagcacggtatcgtaaccaactgggatgacatggagaaaatctggcatcacaccttttacaacgaattaagacttgcacctgaagaacatccagttttgctaacagaagcccctatgaacccaaagtcaaacagagagaagatgactcaaatcatgttcgagaccttcaatgtcccagctttctacgtttctattcaagctgttctgtctttgtatgcatcaggaaggacgactggtattgttttagattctggtgatggagtgacacatgttgtacctatatacgctggttttagtttacctcatgctattctgagaatcgatttggctggtcgtgacttgaccgattatttgatgaagatcttgtctgaaagaggttacactttttccacaagcgctgaacgtgagatcgtcagagatatcaaagaaaaactgtgttacgttgctttggactttgaccaggaattgcagacatcatctcagagctcaagtattgaaaagtcttatgaactaccagacggtcaagtcatcaccattggtaacgagagattcagagccccagaggcccttttccacccatctgtgctggggttggaggcttccggcatagaccaaactacttacaattcgattatgaagtgtgatgttgacgttagaaaggagttgtactccaacattgtgatgtctggtggtaccaccatgtttccgggaattgctgagagaatgcaaaaggaacttactgccctggcacccagttcaatgaaagtcaagatttctgctcctcctgagcgtaaatattcggtctggattggaggttctatccttgccagtcttggtactttccaacaaatgtggatctctaaacaggagtatgacgagtctggaccctccattgtccacttgaagtgcttttaa

SEQ ID NO: 3993 - DNA, 549 bp, Artificial Sequence
  Optimized genes for Pichia pastoris
atgtctggagggcctgtacccgttttcaagaaatataccactggatccaagggaatctgggaaaaaatacgtcaattgttgactttggtcccaaacagatccactggtaatcctctggtcaaaaattacagagttcctcctccaggttctcaaactctgaaatacaaggatcctgttaccattccagctggtgacattgtcaagaaccaatactacgacagagatcatagaagaaactatcctaggttggttgccttcgaccagaccaaggtctcaggacttctcacactgggcagtgcccagaatccaagaatctctgttggtgagaagggtcaaaaggagttggcagtgtttgatcaatcagtgtcgttaagctccacattagccactattgacccaaaggttgttaaatctgaactacttgctgaaggtggttccccagtcgttgctccgtctttgaacaagaagatgaagttccgtttgaccgaagagtctgagcacggtatgtacccagaggattatccaatcagaatttttgctcagaactaa

SEQ ID NO: 3994 - DNA, 435 bp, Artificial Sequence
  Optimized genes for Pichia pastoris
atgtctgatgttgagcaacaggttgttgaagaagtggaagttgctgtcgaggaaactagcgcctcgatatccattgaggacgccgtcaagaaggttctgagaatttctttggtccatgacggcttggccagaggtctaagggaagcatccaaagcattaagttcaggagctgctcagctttgtgttttgtgtgattcagtgacagatgaagctatcattaagctcgtggaggctctgtgtaatgagccagaagagaagattcctttgatcaaagtatccgatgccaagcaattgggtgaatgggctggtctttgcaccttagacagagagggaaacgctcgtaaagtagttggtgcttcttgtgtcgtcatcaaggactggggtcaagattctgaggagagacacgttcttttggactacttctcttccaactaa

SEQ ID NO: 3995 - DNA, 2271 bp, Artificial Sequence
  Optimized genes for Pichia pastoris
atggtcaatgtcaagttcgaagactactcttcccttttggagagtctagaccaaaacattgaccaggccaacagaagagaagatccatttgccaagcaaatgcaaggtgttaaaccaagattgtctacaatgtcttattcctctgccggtagctacacacccgactcatcacccgacatgatcttcaaccaagagcaatataatgaaaatcaattcaatgaaaacatgtttaacaacgatctttactcaaccctgtctgaattgcctgaactaagcaatatgtcctcatccatgagtggaacctctgagaacaacagccctcattcaacagagttgaacgacttgggtatgttgaatggaattaacttcggttcttctgctgataccaacaatactgttggatcatctgtaaacactaccatcggtgatcaagtcttgttacctgtcgtcgacatggagagaaatgatgctattgctgcttccgcagctcaccaatccatcaaggactctaaggtggcaaagcctagaaagaagatgaagtcgtctcacaatcttatagaaaagaaataccgtacgaacatcaacagtaagattttagaactgcgtaattgtgttccaactcttcgtatcgttatttctcgtaacggtggaggaaactctggtgacgaattttctaaagactatgagggacttggttacagcgatgatgaatcaaagttggacggcttgcagccagctagaaaattaaacaaagctactattttggccaaatctgtggagtatattaagcatttggagtacagaaactcacttcttacgaccgagaatgagaaacttaaagaaattattcaaaatagtggtgccgccactgactccggctccggtaacatgatgaacaagttgatcattggatctttagcttgtttggctggtggctctactctgaacgatatgtcaaatgactcgaggagtttgatgactatgccaattttcattttcaactccaacgagaccacattagcgctaaagccattgctaggtattgttaagggatttttggcaatctacgttttgtatttggtgatagctcccctatttcactccagtacagtatgcattgaaaaagatgagaagactatcgctaacgaaaataacgagtctcctgactggccacaaggtaagcagggtggtttcttctctctgttagtcaacattgccaccagcgggctgtccgtcgcattgaaccgtgacccatacgctcctatgatgcaggctttctacttcaagcaattatcgttgtacggtaatggtagttcgcttgcttcttacattgctgcctcatactggagatgtgccagacaatctcgaaaccagattccagcaactgattcaaaatcccagtatttacttgaaaactttgaatatgctcaagtgtttgagatcaaatcaatgaatacacttctggctaagtaccctaatctgaagctaaacagaactcatttcgttgagcaggtatccaaactcttgtgtgattcattattagagaactgtatccacaagatgattgagctggaggctttgaaattgcaaaagaaggaacagttggcagctgacgatactgagcaggaagagcaaacagaaagaaccatttccgagttccaagaacagagagaccaatacttgaagcacgcctctcagctctcttctaccaacgaacaattgctgaaatgcaagctgatcaagtgtatgatcgacacttctcttgagaatctccaggagtgtggtcgcctgatccaaactttcacttccaataagttgtccaaggatctggtcgcatgctttacttgctgtattatctgtgctttatcagaaggatccccgtcgatagaacaagttaacctttttatcgatcgtcttaacctgcctaactacactaacgtttatgtcaagaacaccaaggtttctctattactctatgtttccttgttgaccatggttaattcattgccagattccacttactcccaaagatttgttcaggttgattctgacagtgacgaggaggatgccctggactctgatagtgttggttctgggtcgtacgacaaccacttggtcagagataaactgaccaatattctttctaacttgaggatcatcactggaactccaaagtccaagaatgatttggccattattgaatccaccaccctcaagtctatcttgattgatggtctcgtgtccagaatcaatttgttggatcatgcttaa

SEQ ID NO: 3996 - DNA, 333 bp, Artificial Sequence
  Optimized genes for Pichia pastoris
atgccagctccttatgagaagggatccgaaaagaaaggtgccactttgttcaagaccagatgtcttcaatgccacactgttgaggctggtggtcctcataaagtgggccccaatttacacggtgttttcggtcgtaaaagtggattggctgaaggttactcttacactgatgccaacaagagaaagggtgtcgaatggtcagagcagaccatgtctgactacttggagaacccaaagaagtacattccaggtaccaagatggcttttggaggactgaaaaaggccaaggacagaaacgatttgatcacatatctagcaaaggctactaaataa

SEQ ID NO: 3997 - DNA, 1506 bp, Artificial Sequence
  Optimized genes for Pichia pastoris
atgactttcgctccgcccctcgaatttgagattgacttgcctaatggtttgaaatatacccaacctttgggattgttcattaacaacgagtttgttgaaggtgttgagggaaagctgctgcccgtcatcaatccatgtgatgaaacgaaaatcacccaggtttgggaagcatcggcagcagatgttgatagagctgtcgatgctgctgaggacgcatttaacaattctgtatgggccactcaagatcccttagagagaggtaaacttatgaacaagcttgctgatttgatcgaccgtgactttaatatccttgcaggaattgagtctatagataatggaaaagcctacacatccgctcaaggtgacgttactttggccgttaactacattaggagttgcgccggatgggctgacaagattctgggtaacgttgtggacagtggaaacactcatttgaacttagtgaagagagaacctctcggcgtagtgggtcaaattattccatggaacttcccactattgatgttggcttggaagttgggtcctgctttggcaactggaaatacagtcgtgctgaagactgctgaatccactcctttatctggtctgtatgttgccaaattgattaaagaggctggttttcctccaggtgttgttaatattcttagcggtttcggcaacccagctggagctgccatcgctgctcatccaagaatcaaaaagattgctttcaccggttctactgccacaggaagaaagatcatggaagctgccgctaagtccaacttgaagaaggttacgctagagcttggtggtaagtctccaaacatagtatttgaagacgccgacattcagaagaccatccacaacatcatcttaggcattttcttcaattcaggtgaggtctgttgtgccggttccagagtctatatccaagacactgtctacgaggaggtccttgaggccttcaagaaggagactgataacgtcaaggtaggcggaccattcgaagaaggagttttccagggccctcaaacctcagaattgcaattgaatcgaatactatcatatattaagcacggtaaggacgaaggtgctagagttatcactggtggatcccgttacagaaacagagggtactacatcaagccaactatttttgctgatgtcaccgaagatatgaaaattgttaaagaagagatcttcggtccagtggttaccattaccaagttctctaccgttgacgaggttgtcggttacgccaacaacaccaactatggtttagcggcaggtatccatacaaataacctgaacaaagctattgatgtggcttctcgtatcaaggctggtgtcgtctggattaatacttacaacgattttcatcacatggttccttttggaggatacggtgaatcgggtattggtagagagctgggggcagaagccttggacaattatacacaggccaaggccattcgtattgcttacactccagagcacaaataa

SEQ ID NO: 3998 - DNA, 1179 bp, Artificial Sequence
  Optimized genes for Pichia pastoris
atgatttctttccaaccatcttactatgtttctacacctgctcttctctcgccgtcacgtcatgaatatggttaccagtcttctgccgtcactccatgtttctttgagaacaacttggacaccgtgctaagtgcacttcaacgtcacaactacacttctccaccacctcctaaaatcaagccaaccgaggatcagaggtcatactacgtcaagatgtccaagaagtctggcgatttttcagactacggtgttaaggtttaccaagaccagaaatttacacacgtttgggtttattccacgtcggacaatgtcaaaagacacttcaagtatcctaattcagcagtacaatatgaaggaatacgcgccaaagttgctcgaaatggaagatttctgttgatccaaattcctaagatctccagaccagatgtggtgttgaacattgtgcagaagagacttcaatccattgccaaccaggagagaaaagaacgtgaggaattagagagaagagagctgcaaagaaaggctgctatggaaagaaacagacgtttaagagctttggaagaacagcaattggctgcccaaagagaatacttcgaaaagtccctgcagagtgctttctctccttttttcacttacagattggagtcaaagcaaaaggatgagcaagagtctaatgctgaatcggccaccaaccaagtaacagccaagcccaacgtcatcagaatccccgtcaaccatgttgatgaatcaaatgaagttatcccaactaaggccccgaaagcaagcaagaccgatgttgaagagcagccaaacgttaatgacgttgagaaggaggctgacatgcaagatgtcgaggaaaaccctaacactcaggatgctgagtacgagactgaacaatttagcgactttgaaggtttctccgacgatggtgacattgaagaggccatcgagcctatggatgaggacgaagaagattctgacaactctcaattcatggaggagccagagattttgaagcgtaggcccagcccttattctatttccttcccagctactttgtctgcagaatcttcctccaccaaggctccaaaaattaagaaaccaaacaagattccaattgaggaggtcgaagacgaggaattcaaacgtttttcaagtagttctgataatgattcctaa

SEQ ID NO: 3999 - DNA, 1230 bp, Artificial Sequence
  Optimized genes for Pichia pastoris
atgtctcaaggtaccttattcattaccgagcaaactcgtggtgttgtgcccaagggtctcgtacagtatttcaagttggacgtcaagatctcaaacaaagaagatgaacaattcaagaagtattttcctcttaactacattccagcctttgttgggcctaagggactgaaactcactgaggtctctgctgttattgaacatttgttgaacctggcgggcgaaaagaagttaaaaggtactacagaattggaacaggtccaagttaataaatggatttcatttttcaacaccgaagtaataagtacttccgcacgtattttcctgccccttttaggcaaagctccttacaacaagaaggacattgatgcagctacagagagattggataccatcattcaaattatagaggcccgactatcagaattcacttatcttgttggtgaaagaatcactgttgccgatttgtttgctgctactgtcattggtagatcgctagagaccatttttgacaaggcttggatctccaagcaccaagatatcttcagatggttttctacggtgtccgctcacccagttctgtcttggagatacgttgacttcaaaccaagagataagcctgttgagtacgtccctcctaaaaaggaaaaaaaagagaaaaagaaggaggaaaagccaaagcaagagaagaaacctgcaccagctgccgctgagcagagtgatgagccacccgtcgagaagaaggccaagcatccattggaggctttgggtaagccaaagcttgctattgacgaatggaagagattctacagcaatgaagaaaccagagaatctgccatcccatggttctgggaacactttgatgctgatgaatggtctttgtggaaagtaacttacaagtacaatgacgagttaacattgaccttcatgtccaacaacttgatcggtggtttctttgccaggcttactggttccatcaagtacatgtttggatgtgccgtggtgtatggtgagaacaacaataatggtatcatcggaggatttatggtcagaggtcaggactacaaaccggcatttgaggttgctccagactgggagtcttactcatatgaaaagctggatcctaactctgaggaggaccgtgagttcttcaataacatgttggcctgggacaaaccaattgttgtcaacggagaagagaaggaaattgctgacggaaaggttttgaaataa

SEQ ID NO: 4000 - DNA, 1167 bp, Artificial Sequence
  Optimized genes for Pichia pastoris
atgtctcatagaaagttcgaggctccaagacacggatctttgggctttcttccaaagaagagagcttcttctcctcgtgctagatgtaaggcattcccaaaagacgacaagtccaagccagttgctttgactgctttcatgggttataaggccggtatgtccactatcgtcagagacttggatagacctggatccaagatgcacaagagagaggttgttgaagctgtttctatagtggatacacctcctttggtcgtagtcggtgttgtcggatatgttgagactacctccggtttgaaaagtctgacaacggtttgggccgagcacttgtctgatgacgtacgtagaagattctacaagaactggtacaaaagcaagaaagtagccttctcaaaatacagtgccaagtacgccaatgacccggcaagtattgaaactgagctagccagaatcaaaaaatatgcttcagtcgtcagagtcttggttcacactcagattcgtaagactccattgaaccaaaagcgcgcccatttagctgaaattcagatcaacggtggatcaatctctgaaaaggttgactgggctcgtgaccatttcgaacagaccattgctgtagatacagtctttgagcaaaatgaaaacattgatgttattgccgttaccaaaggtcacgggtttgaaggcgtcacacacagatggggtactaagaagctgccaagaaaaacccacagaggtctcaggaaggtggcatgcattggtgcttggcatcctgctcacgttatgtggactgttgcaagggctggtcaaaacggatttcatcatcgtacatccattaaccataagatttatagagttggtaagggtgatgatgaatcgaatggttctaccgagtacgacagaaccaagaagaccgttacccccttaggtggtttcgttcgttacggtgagatcagaaatgatttcgtgatgatcaagggctccatcccaggtcctgtcaagcgtgtggtgacgttaaggaaatctctttacactcaaacttcgcgaaaagcaactgaacaagtcaccctgaaatggattgacactgcctcaaagtttggaaagggaagatttcaaaccccagctgagaaggctgcttttttgggaactcttaaaaaggatctacagtaa

SEQ ID NO: 4001 - DNA, 1230 bp, Artificial Sequence
  Optimized genes for Pichia pastoris
atgttgactaaggtcatttctttggccattttgaccgcctcggcatttgctgattcaggagagttcactttgtggaatctatctccaggagacccttacgactctactttctggggtgtctccgaggggttaattgttccagttgaaccaggcgtcacttttgtcatcactgacgatctgcagctgaagactactgatgaccaatttgttaccgtgggtgaggacagcgcacttggccttggagctgagggatccgttgagttttctatcatcaacgaggatggtattacttccctctactacaacggtgagttggtaacagcttacatttgtgaaggtgccgaacctcaaatttatctgaccggttctgaagaagatccagaatgtgtttcttacactgttgctgttattggtgttgacggtgaagctccacccaccttcccagaggaagacgacgagacaaccaccaccgatgatcctaccgacgagcccactgatgaaccaactgacgagccaacggacgaaccgacagacgaacccacagatgaaccaacagatgagccgaccgatgaacctactgatgagcctacagatgaaccaaccgacgaacctactgatgagccaactgacgagccaactgacgagcctaccgatgagcctacagacgaacctactgaagagcccacagaagaaccaaccgaggaacctacggatgagccaactccgcctcctccacactggggaaatgaaaccgtcactgctaccaagaccgaatatgagaccaccaaggttactataacttcatgcgaggagaccaaatgctatgaaactacctcggatgcttgggtttccacttgtactacagagatcggaggtaaggtgaccaagattgtcacctggtgtccaattcctagtactccaggtcctaaaccaccaaagccaacaaaacccactgagactaaaccaaccactgtcccagctcctactactaaaaagcctgaaacaccaacaacgaagaagcccgaaactcctgccccagaaaagccagagaagacaacaactgtgattccacctcctaccactgagaaaccttccaccttaagtacttcttctgtgactggatcagtaaccatcccaactatcaccgcaactggtggtgctggttccaacttcaacttgggtggacttaccgttggtgttgccggtatcgccatggctttgttcgtctaa

SEQ ID NO: 4002 - DNA, 192 bp, Artificial Sequence
  Optimized genes for Pichia pastoris
atgtcaagacagggaggcaaagcaaaacctctgaaaaagccaaagaagaagactcaagagtttgatgaagaagaccttgctttcaaggccaagatgaaggctgatgctgctgccaaaaaagccatggctgagaaggcttccaagggtggtccattgattggtggaggtatcaagaagtctggtaagaaataa

SEQ ID NO: 4003 - DNA, 354 bp, Artificial Sequence
  Optimized genes for Pichia pastoris
atggcctctgctggtttgaacgatgttgttaccagagagtataccatcaacttgcacaagcgtctgttcggtgttcaattcaagaaaagagctcctaaagcagtgaaagagattaagaagtttgctaaattacatatgggaactgaggacgtgcgtttggacccaaagcttaacatggctgtttggaagagaggtatcaagggtgtccctttcagaatgagattgagaatttccagaaaaaggaatgaagacgaggatgccaagtacaagctattttcatacgttgagccagtcaatgtaccaacagtcaagggactggaaactgttgtcattgaagaagatgatgaagagtaa

SEQ ID NO: 4004 - DNA, 1089 bp, Artificial Sequence
  Optimized genes for Pichia pastoris
atggctaaatcttcaaaggtttcttccaaatcagctgccaaggcttccaagggtgaaaagaagtccaaaaagcaggagtcaagctccagtgaaagtagttcaggatcttcgtcggaatcaagtggttctgagtccgagtctgaggaggaatctgtcaaggaatccaagaaagaagccaactcctccgagagcgagtctgaaagcgaatcggagtctgaagctgaatctgacaagaaggaggaggccgctgagtctggttcagagagtgaatctgagtcagaaagtgagtccgaaaaagaagacgagaagtctgctaagcgtagtgccgaggaatccgaagaagagcccgccaaaaaagccaagacagaagaaattaccaccctatttgttggtcgcctttcttggtctattgatgatgaatggctgaagaaggagtttgagcacattggtggtgttgtgggtgccagagtgatgatggaacgtgctactggtcgttccagaggatacggttatgttgattttgacaacaaggcatcggcagagaaagcactggaagagatgcaaggtaaagagatcgatggtagaccaatcaacgttgacatgtccaattctaaacctgcagctccagctgctagaaacaacgatagagcttctcaatacggagataagagatctcctccttctgatactttgttcttgggtaacttgtctttccaagctgacagagacacattatttgaacttttctctaagcacggtaatgtcacgtccgtcagaattccaactcatccagagactgagcaaccaaagggattcggttacgttcaattctcatcagtagatgaggctaccggtgctttggaggcactcaacggagaatatgtcgacaatagacctatcagattggactactctaccccaagagatccgtctgcctctggaggaaggggagggcgaggtggtaggggcggccgtggaggcttcagaggtggaagagggggattttccggtgaccgttcatttggttccggcgccaatagcgctcctgtcaattcaggtttccagggtcagaagaagactttcaactaa

SEQ ID NO: 4005 - DNA, 915 bp, Artificial Sequence
  Optimized genes for Pichia pastoris
atggctgacaacaacaagtccaacttctttgttgacttcatgatgggtggtgtctctgctgcagtatccaagaccgctgccgctccaattgaacgtgtgaaacttctgatccagaaccaagatgaaatgttgaagcaaggtagattggccaagaagtacgatggtattgctgaatgcttcaagagaactgctgctgatgagggcatagccagcttctggagaggtaacactgccaatgtcattcgttacttcccaacccaagctttgaactttgccttcaaggacaagtttaaagctatgttcggtttcaagaaagacgagggatggtggaaatggttagcgggaaatttagcaagtggtggacttgccggtgctacatctctgtttttcgtttattctttggattatgctagaaccagacttgcaaatgatgcaaaggcttcaaagggttctggtgagagacaattcaacggattgattgatgtctacaagaagactttggctactgatggaattgccgggctgtaccgaggatttttgccttcagttgttggtatcgtcgtttaccgtggtctttattttggtctgtatgactccctcaaaccaatcgttctggtgggacctttggagggttcctttctagcctctttcttgctaggctggaccgtcactacgggggccagtacagcatcatacccccttgacactgtgaggagaagaatgatgatgacctcgggccaggctgttaaatacaacggtgcctttgatgctttcagaaagattgtcgcagccgaaggtatcaagtctttatttaagggatgtggtgctaatatcttgagaggtgttgctggagctggtgtaatttccatgtacgaccaattgcagatgatcatgtttggaaaaaagttcaaataa

SEQ ID NO: 4006 - DNA, 849 bp, Artificial Sequence
  Optimized genes for Pichia pastoris
atggccagaggtcctaagaagcatttgaagagattggctgctccgagtcactggatgttggacaagttgtcgggaacttacgccccaagaccttctccaggtccacacaagttacgagagtctcttcccctgatcgtcttcttgagaaacagactcaagtacgctttgaacggtcgtgaagttaaggctattttgatgcaaagacacgttcaagtcgatggaaaggtcagaaccgatgctactttcccagctggtttcatggacgtcatcactttggaagcgaccaacgagaattttcgtcttgtttacgacgtgaaaggaagatttgctgttcatcgtattactgatgaggaagccacctacaagcttggaaaagtaaagaaagttcagctaggcaaaaagggtattccttatttagtaacgcatgatggtagaactattaggtatcctgacccagacatcaaagtcaatgattcaattaagattgacttggccactggaaaaattttagattttgtcaagttcgacgttggtaaactggttatggttacaggtggtcgtaacttgggtagggtcggggtaataacacacagagagaagcacgaaggaggctttgaccttgtgcatatcaaggacgcactcgagaaccaattcgtcaccagactgtccaatgtgtttattattggtgaggcaaacgctccaatcatctccttgccaaagggaaaaggtatcaagctaagcattgctgaggaaagagatcagagaagacaacagcaaggtctggacgttgaggccgaagaggaggttgaagaagaagcagatgttgattctgaagtggatttcgagtaa

SEQ ID NO: 4007 - DNA, 1218 bp, Artificial Sequence
  Optimized genes for Pichia pastoris
atgcaaactttcgtcaagagatccattagaaacattccaaagatggcaacatcggcgcatcagaactttgccaagtacctcgcaactgatcatatggccagtgatctggtaccccttgatgcttccaagctacaggttaccagaaccacccaaccaaaatctaagctgcctaaggaaaaactagtgtttggtcaatctttcactgaccacatgttgactgttgaatttgaccaagcttctggatggggtactccagagatcaagccatacggacccctgtcattagacccttccgcttgtgtcttccactatgcatttgaactttttgagggtatgaaggcctacaaggattctcaaggtaagatccgtcttttcagaccagacatgaacatggctagattcaacaagtcagctgccagaatctgtttaccaaccgttgacggtgaggaattaatcaagttgattagtgagcttctcaaactagatcagtcgtttgttccagaaggcgaaggttacagcttgtacatcaggccgactttgatcggaacctcatccggtttgggcgtaggggcacctgacaaggctttgctgtacgttatttgttctcctgtaggcccttactatccaactggttataaagccatttctttggaagccacagactacgctactcgtgcttggccaggtggtgttggtgacaaaaagcttggtgccaactatgctccttgcatcaaaccacagttgtctgctgctaagaatggtcaccaacaaaacttgtggttgttcggtgaggagaagttcattactgaggtcggtaccatgaatgttttctttgtgttcaagaacgctgataccggtaagaaggagttggtcaccgctcccttagatggtacgatattggagggagtcacacgagactctattctgaaacttgcccgtgacagattggatcctaacgagtgggaagtcaatgaaagatactacactgcccatgaagttgctgagaaagctgaaaacggtctgttagttgaggcttttggatcaggaactgctgcagttgttgccccaattaaaaatattgctttcaatggaaaggactatgatgttcctttggtgccaggagagcaatatggagaaatggccaaaacagtggcagactggattgccgatattcagtacggtgtcgttgattccgaatggtccagagtcatcaactaa

SEQ ID NO: 4008 - DNA, 345 bp, Artificial Sequence
  Optimized genes for Pichia pastoris
atgggtctgggaaacttctggttggagagaaacattaccaacaagcatttggtcaggagttcaaattttgccgaagacagaactcaaagattgaaagaagccaagttggatgcagcaaaggacatcaaggagtacaagcaaaagaaagagaaggaactgaaagagcacgaggctcaattctccggttccaacgatgacttggaaaaggctgctgagtctgaagttcagactgagttagttgagattgacaagtctgctgaagctaagaaggaagatgttgtcaaacttctattagatgccatcacacacccaaagcctgaacttcatgtgaatgcccgtgcttaa

SEQ ID NO: 4009 - DNA, 309 bp, Artificial Sequence
  Optimized genes for Pichia pastoris
atggttcaagagatcaactctgctgaagagtttgacaaggctattgccagtggtgttgtgttagtggatttctttgcaacttggtgtggtccatgcaagatgattgctcctgtattggataaattctcaaaagaatatgaacaagtcactttctacaaggttgatgttgacaaactttccgaggttgctgcaagatttgagatttctgccatgccaaccttcttgtttttccagaatggtgaagttgtctccaaggtcacaggagccaacgctgctgccatcaagcaaactattaccaagctgatctaa

SEQ ID NO: 4010 - DNA, 1779 bp, Artificial Sequence
  Optimized genes for Pichia pastoris
atgaagaacttcttcaattcatctgactccgagaagcacgaggaaaaggttaacgatgaaaaagtccaatctatctcttactctcagtcaattttgtcgcttccagacttggaccctacgttgtccagacacgcctctgagtatgaagctgatctgtccaagattcagccaggtgtggctggtgagaaaggtcaccaattgaagagagacctgaaagccagacatatctccatgattgccctgggtggatcattaggcacaggccttctgatcggtaccgctaattcgttagcaactgctggtccaggatccgtctttatcacctattcatttgttggtttgatggttttctttgtgatgtctgctcttggtgaaatggctacttatattccgctcgctggaggattcactggttactccgaccgttatgctcatccagctttgggttttgctgttggatactcatatttggcaaagtacttgattgttactccaaaccagctcgtggccggaagcctagtcatgcaatactgggtttccccagagaaggtcaaccctggtgtttggatcacaatctttctggtttctgtcgttttgatcaacctgttcggtgtcaagttttttggagagttagagttctggttgagtagtctcaaagttattactgttcttgggctaattattatgttgttcgtgttcatgttaggaggtggtcctgaccatgaacgattaggcttcagatattggaccaatcctggagcattcgctccatggaagggtattgcatctattccaaaggccaaatttattgcttttgtctcgtctttcgtttacgcagtgtttgcctattctggaactgaattggtcggtgttgttgtagctgaagcgagtcgtcccagaagaaacgttccaagagctatcaagttgaccttttacagaatttgtgttttctacatcttatcggtacttttgttgggatgttgtgtcgcatacaacgacgctgagttggttgccgctcgtgctaagtctacttcttcttccgcctcaccattcgtggttgccattaatgcccagggcatatcaggattacctcatctgatgaacgcctgtatcttgattttcgtcttctccgcttgtaactccgatttgtatatcgctaccagaactttgtacggtctaagcgttcaaagaaaggctcccaagatcctgtcaagaaccaacaaaacgggtgtcccatatcttagtcttgccgtcgctttctgtttctcttgtttggcttacatggcctgcagctctggttctgcctccatttttggctacttcgtaaatgttgtctccatcatgggtctgttgacttggataagtctccttataactcacatctgttttatgaatgctatgaaagcacaaggtatccccaggaaatctttgccttatagggctcctttccaaccatacgcttcttggattacattgtttttctgcattcttgtagcgctaattaagaattttacagtatttttgaacggtttcaactacaaagatttcatcactgggtacattggtattccttactactttatctgcttttttggttacaagttcattaccggtgccaagcgtcacaaatccgcagaagttgatctactgacccacaaggacgtcattgatgccgaggaggaagaatacgcctttgcagaggctgagcttaaggctgaaagaggtaacaagaaggatgctcaatggttatatgatcgtatcttcggatggattttctaa

SEQ ID NO: 4011 - DNA, 408 bp, Artificial Sequence
  Optimized genes for Pichia pastoris
atgtctgacgcagtaacaattcgtaccagaaaagtcatcaagaatcctcttctagcaagaatccaattcgtcattgatgttcaccatccaggtaaggccaacgtttccaaggacgaattgagagagagattggctgaaatttacaaggctgacaaggatgctgtttctgtttttggattcagaactcacttcggtggtggaaaaagcagtggatttggtttagtctaccagtctgtgtcagatgccaaaaggtttgagccaacttaccgtctgatcagatatggtttggcccagaaggttgaaaaaccttcccgtcaacaaagaaagcaaaagaagaacagagacaaaaagattttcggcacccaggagaagtttgctaagaaagctgccaagagagctgctgagtaa

SEQ ID NO: 4012 - DNA, 1329 bp, Artificial Sequence
  Optimized genes for Pichia pastoris
atgccatcccattttgacactttgcaactgcacgctggtcagactgctgaagctccacacaacgctagggctgttccaatctacgccacttcttcctatgttttcagagattctgagcacggcgccaaactattcggtttggaagagccaggttacatttactctcgtttgatgaacccaactcaaaatgtgtttgaggagagaattgccgcgctagaaggaggagcagcagcccttgccgttggttctggtcaagcagctcaattcttggcaattgctggtttagcccacaccggtgacaacgtcatctcaacatcatttttgtacggtggaacttacaaccagttcaaagttgccttcaagcgtcttggtattgagtccagatttgttcacggtgatgatcctgccgagttcgaaagattgattgatgacaagaccaaggctatctatgtggaaagcataggaaatccaaagtacaatattccagacttcgaggctctggcagagttggctcacaagcatggtatcccgctggttgttgataatactttcggagcaggcggctattacgtcagaccaattgaattaggagctgacattgttacccactctacaacgaaatggattaatggtcacggtaacaccattggaggtgtggtcgttgactccggtaagttcccatggaaggactaccctgaaaaatatcctcagttttcaaagcctagtgagggataccatggattgatcttgaacgatgcttttggtccagctgctttcattggccacttgagaactgaattgcttagagacttgggacctgcttcttctccctttggaaacttccttaacatcattggtcttgagaccctctcactgagagctgaacgacatgctgagaatgccctgaagttagctaagtatcttgaaacttccccatacgtttcttgggttagttatcccgggttagagtctcatgactatcacgaagctgccaagaagtacttgaagaacggtttcggtgccgtactctcgtttggtgttaaagatcatgggaaacctgcactcacaccattcgaagaagccggtcctaaggtcgtcgattcgctgaaagtatttagcaacttggccaatgtaggagattccaagtccttaatcatcgctccttactacaccacccatcagcaattgagtcatgaagagaagctggcttcaggtgtcacaaaagactctatccgtgtgtctgtcggtactgagtttattgacgatcttatagctgatttggagcaagcttttgctttggtctacgaggaagccaacactaagttgtaa

SEQ ID NO: 4013 - DNA, 3051 bp, Artificial Sequence
  Optimized genes for Pichia pastoris
atgctgaacagagtcttattggtagctctgtcttgtgttgtgttctttcacctggtgactaccttcccagttggaacctcatcagacagtctacagatcagaaaccttttatcccacaattttaccagagctaacatctccgagggtttatcttcaggagccacatattttgtggatgaggacactgaaacttactatgacaaagaactgaaggttctgagaactactagattccctaggtacaacaactatcagttgcaaccatatgttgccaatggctacattggttccagaatcccaagagttggttcaggcttcacctacgacactagtgacaacaaaacatcagaaaacttgaaaaatggatggccattgttcaacaagcgttactcaggtgctttcattgctggattcttcaattcacagccaaccgttccagagaccaactttgaagagttggagaaggacggatacgagagtatcattgcctccatcccccaatggacttcactggaacttactgttaatgtaaacggtaccaatcaaaccctcaaggctgacgacgtcgacattactcatatctcggactactctcaacagctttctttgttggacggtattgtcacaacaaattacacttggcttggtctcgtcaacgtctctatttctgtcctcgcacacagagatattgtttcattaggtttcgtttccttagaactatcttcccaaaagaacattacagtgagcgttaccgatatcttagattttgctactagcacaagatgttcttatctggacagcggtgtcaatgaacagtctatcttcatgaaggtccaaccctccaacgttcctaccaatgcaactatctactccagcttaatgtcctcgaattctactagctcgttactaaaacagaaccagaccgtttcgcaaaccttgcgtgttaacctgtccaagaaccaagctgcctctttccagaagtacgtcggagtagtttctgatgattatcttgattctatcgaaacaaacttaacctcctatcaattcgccagagagactgccaagttcgcagagattaagggtagatcttggattttgaagtcccataaagaggcttggaacgagcttttgaacggtaagtcaatcgtcttccatgacaatgactttttaacgcttgcttctgattcctcaatttatcacttgatggccaacactcgttctgaggcaaatgggggcacgtctgctttgggtgtttctggtctttcctctgactcctacggtggaatggttttctgggataccgacttttggatgttgccatctgtgcaggccttctcaccaagacatgctgtctccttgtccaaattccgtgatcatacacacgaccaagcaaagaagaatgctcagacacgtgacatgaacggggcagtgtacccatggaccagtggacgttttggaaactgtacttctaccggtccatgttacgattatgaataccatattaatattgatatcgcctttatgttctggaaactttacttgggtggtgccattgacgatgactacatgaaggagttcggttatcctattattgaagatgtggcgtcatttttcgtcgattacgttgattacaactccaccttggataaatacaccacccgaaatttgactgaccctgacgagtatgctgaattcaagaacaacgctgcttttactaacgttggtatctctcaattgatgaaatgggcactcatcttgggcaaacatttgaaagtgggaaatgagagaagttatgacaagtgggaagacatcatgaccaagatgtacctgcctgtgaaccacgctggtgatgttactttggaatatactggtatgaataacagcattgaagttaagcaagccgatgttgttttgattagttaccccctggatgatgaagatggagcattgcaggagtactttgactacgacgaagacagagccataagtgatgtcagatactactctgacaagcagactgatgagggacctgctatgactttctccgtatattctgccgttaacgctaagtttaacaaggaaggatgctcttctcagacgtatttgcttaagtcagtcgagccatacttcagatttccttttggtcaaatgtctgaacaatctacggatcaatacgacaccaacggaggaactcatccagctttcccatttttgactggtcacggtgcgttcttgcaatccagtatttacggccttacaggtttgaggttctcttacatctacaatgatacagataagtcgatcaagagaagattggcctttgatccgctccagctaccttgtcttcctggaggtttcagtataaatggttttgtttacatgaaccaaacgctagacattaccgtaaacgatacttacgctaccatcgctcatagaggtaacgccactacaatcaatgtgtatgtagactctcgtaacgaaatgggtggaaaggagcacaagatccaacctggtaaatctctgagtatacccttataccaaactgagcaaaacattccaggttcttttattgagtgtaccgtcaagaatgtcaccgctcttcagcctggggtcgtcggtgacccaattcaagctgttgctgatggcgataattccactatttggaagattgagtcgagggaagaaccaactcacctaattttcgacttgggagatgaattggacatagaaggtggtctggtcgtttggggtacttatccggccgaatcgttttctgtatctgttttgagagacttcaactcaactaattatcgagtcattaacaatgttgagaactacgatttgatctatgagtccggtaacgtcactgcttcctccccattcgatgagtctcacatcaaaaaagttcaaattcttccacacaactgcactaacttcactttttccgaattgaccgcatcacgctatgtgctgtttgagtttacagacgttctgggttaccctcaagattattcatacggagctcaagttgctgaggttgtcttgtactaa

SEQ ID NO: 4014 - DNA, 438 bp, Artificial Sequence
  Optimized genes for Pichia pastoris
atgggtaaaggcaaaccaagaggtttgaatgctgccagaaagctaagggtccacagaagaaacaacagatgggctgacttgcaatacaagtcaaagttgttaggaactgccttcaagtcctctccttttggtggttcttcccatgccaagggtatcgtgctggaaaagattggcattgcatccaagcaacctaattcagcaatcagaaaatgcgtccgtgttcagctgatcaagaacggtaagaaggttaccgctttcgtcccaaatgatggatgtttgaactttgttgatgagaacgatgaagttctccttgctggttttggaaaacgtggaaaggctaagggagacattccaggtgttagattcaaagttgtgaaagtatctggtgtcagtttactttctttgtggaaggagaagagagagaaaccccgttcgtaa

SEQ ID NO: 4015 - DNA, 1035 bp, Artificial Sequence
  Optimized genes for Pichia pastoris
atggacattgaggctgagccatcattacgatccatagtcaaccatgaatcgcttaaatggattttcgtaggaggaaaaggtggagttggtaagacaaccacttccagtagtatctccattcagttggccttgcacaaccctaataagaaatacctgcttatatccaccgatcctgctcacaatctaagcgatgctttcaaccagaagtttggtaaagacgctcgtcaagtagaaggtttaccaaatctcagctgtatggagattgaccctgattcaacattagaaaacttgcaaaagaacaatgagagtactttcggttcagcaggtggtaacgatcccctcaagtccatgatgggtgatatcaccggctcgattccaggtatcgacgaggcattttctttcatggaagtgttgaagcacattggtgaaaccaaggagaaccagatcaaatatgacactgtcatttttgacaccgccccgacaggacatactttgagatttcttcaattgccatctaccctggaaaaattactgggaaaggttaatgaactgtcagggaggtttggaccaatgttgaacaaccttctaggatctcaaggtggtcaatctattgattttgcttctaagatcaaggaaattcaagtgcaggtcactgaagttaacaagcaattccaagatccagagctaacgacttttgtttgtgtttgcatttctgagttcttgtctttgtacgagactgagagactgatccaggagttgatgtcttataacatggatgtcaattcaattgtcatcaaccaactgcttttctctgacgattctgaatgtagaagatgtaatgccagatggagaatgcaaaaaaagtatttggaccaaatggatgagctgtacgaagactaccatttggtcaagatgccattgttggctatggaggttcgtggcttggagaatttaaagaagttctccaagtacttgatcgagccttacaactccgaaactgatggtcacgttgttttcgacttggaagaacagtaa

SEQ ID NO: 4016 - DNA, 321 bp, Artificial Sequence
  Optimized genes for Pichia pastoris
atggctactgaaactgctctgtcttacgccgcactgatcttggctgactctgagattgaaatttcatcggacaatctactcgcattaacaaccaaagccgacgtcaaggttgacaagatttatgctgatcttttctccaaggcccttgatggtaagaacttgaaagatttgtttttcaacatctcctctgctccagcttccggagctgccgctggtggtgctgcagccagttcagccgatgctgaagaagctgctgaggagaaggaagaggaagccaaggaggagtctgatgatgacatgggatttggtttgttcgactaa

SEQ ID NO: 4017 - DNA, 444 bp, Artificial Sequence
  Optimized genes for Pichia pastoris
atgtctcaagaggccaagtccgtccagtcagttcaaactttcggtaagaaaaaaagtgcaaccgctgttgctcacgtcaagcaaggttccggccttatcaaggtcaatggatctccaattaccttagtgcagcctgaaattcttagacacaaggtttatgagcctctactcttggttggtctggacaagttcgccaacattgatatcagaatcaaagtcactggtggaggacatgtatcgcaggtgtatgcaatccgtcaagctttggctaagggattgattgcttacacacagaaatttgttgatgagtctaccaagaacgaattgaaaaagattttccaatcatacgacagaactttgctgatagccgactccagaagaaaggaaccaaagaagtttggtggtagaggtgctagggccagatttcaaaaatcttaccgttaa

SEQ ID NO: 4018 - DNA, 5937 bp, Artificial Sequence
  Optimized genes for Pichia pastoris
atgtcatttaagcaaagtctcctgtcccagactccttcttccattaccccatcccaatttttagctgaccttatctctcaacattctaacgagcagaagaacgttttggccttactatttgctgagatactggtgcctggttcccagcacatttcttcttctacatcgactaaaacaactgctttgactccatctactttgccggaagcgacggcaagaggttcacaattccgttccttgttgaagggtctgaacattgagcagtctacatgggatcaaattatcgagttgattttcgagaccgacgactacttctcggatgctacatctatttcccaggtcactgtcgcttcaatctctcaatttcttgcttctctggaacccgagaacatcgacaagttcttgcgttacgttgctcatcataaactgaaggaccacccattcttgtttcaaaagaacctcctggtcagtctgtattctttgaaccctcaacatggtgccattgatttgctgtcttgccctttgcaaccagtcttggcaaacgaaccaaactccagacgtactattatctggttcaaatatattgccgaactagaagtttctcttctagtggaattgaagtctcgaccagccacagcggatgaaaaccagattaatgagattattgaagattcttacaagacagctcccgaatacttaggacttgccgctctgcacttgtggaaggaaaataaagataacaacgccgatccgggcaccacattggcttacttgaacctttgccatcactttattgtccagcttctggatatcaacagtccttacttgattatactcttgactgagtttaaagagatctccgaagacgagttgtcctccttgttggctaactacgtgagtttgcgacccaacggagcaattactgtggctacttatgcactgagggatggcgtgctgagtagcgtgctaaacaaattgtcaaagtttaatgactgtttgtccgttgctatagaagcatctaaccttggatggaacggtttggaaaagtttgttcagaacttgttgagcaataaccccaagcaggttcaatcccaattggtcgattttttggaggaacaaagcagctttgagtatcagtcctcgaacaatgaatctaatgctcaaataaaatcccacaggtctttgtcgattcctgttgtctacactttgttaaaggcaattgagggtcaaaagctgtctggagatctggtagacaaattcaagaacgtccaagtttctgtcatccaggcttatccacgcttgatcaacttcggtaggggtcacgatgaagctatccttgccaatggaaactctcactctttcccaccatccgtcgaacaagaaatgaagtcctactaccaaaaaatgtacctgaagcaattagagatcaagtcagttattaactctctaaaagctttcaaggactcagacaacccacacgagcaagacatcttcgcttgtatgattcactccctattggatgagtacagattcttccctgagtacccaattgatgcacttgcaactacctctgttcttttcggatccactatttactttcagttgatcgaaggtaccaccttaacaattgctttgagatacattctcgaatcgtgccgtcagcctccagaagataatatgttcaagtttgcagtccaggccttgtacacctttagagagaagttaggggattacaaaagttactgtgctcttctttctgaagtcccatctttgaaacaacaacctcagatttatgagatcttacagcaagtcatgaatggtacgtttagagctcctccttccatcccgtctcaaggtattggtagtggtgaaagacagccctcgcaagggaagcagccgtctaacgattcattggtcgtttccaagttcaaatcattaaacttggccgttgagctgcagagaagagatcaggagactccagatgagaacgtttccgatcacgttctgttcctagttaacaacatcaccgaagagaacttgtctgctaaggtagaggagatgaacaaggttttggagcctcaatatttcgaatggttctccaattatctagtaacccaaagagttaagacggaacctaactatcattcattgtattgttctcttatttctcgtttggacaatcttttactggacgcctacattttgaatttgacgttcaaggaaatcattctgattttgaacaagtgttacgatgtcaacgacgagatttctggtcctgagagaacacatttgaaaaatctcggatcttggttgggattgatcaccctcactagaaaccgtccactgaagcaccgtaatcttgcattgaagatgttagttttagaagcctatgataagaataagttggaagttgtgcttccattggtctgtaagattctagatcaagctaagaactccaaggtttttcttcctcctaacccatggaccgtcggtaacttgaagttgcttaaagaactttatgacgttgggaacttacctctgaaattaaaatttgaaattgaggttctctacaattctcttaacaccaaattgggtgacattgaggctgccaacataattagaactcatcaaccagctgatattgaccagtttgctgttgcaaccaacatgatgaaggagctcaccttgagtaatgtcaaccaaatgaaacagcaacagcagcagcaacaacaacaacagcagcaacaacagcatcagcaacagcaacaacaacaacagcaacaacagcaacaattctttttgcaacagcaggcagcccttcaagctcagcaagtgcaacaaccccaaattccatttgacccacaggctaatccaggtgtctccaccgctacccctgcagatgaaagtaaccaattgaaagttttctctaatttgttgggtactacttcattcgtgaccattccaaccctgaagtatttgttccaagctgctctggctagagccgtcaaggagattttgcctcttgtggttgaccgtactaacttgattgccctcgtcaccactaaggccttggtttcaaaagacttcgccctggaatccgacgaggccaaattcagaactgcttacatcaaccaggtatcataccttactgaatctttgagcttggcttcctgtcgtgaccccctgagagaatcaattcagatgaacgctttgcagatcgctaacacaatgccaaatattgactctactctttttgaggagttgccacaagccatcactgataacattgatttagcttctacgataatccaaaaggctgctgtcgaaagggctattcaagatattgacgaattaatggctccacaactggcaatcagaagacaacacagagagctaaaacctaatcaacagtttatcgatcctaccatgagatctagataccccatgctcctgccagttccattaggattgaaatctgacggagttatcccaaagcagttcatgatctacgaaaactttggaaagaacagaatcgtctccccaatgcaacagccagagcaccttcagaatatcaattctcagctcaacccttcccttcgtcaaggtgcacaacaacctttggtccctccaggtgttgccgaacagatgaagcaacaaatgccccccgctttgccaggacaaggaggagctgtatccttggagcaaacattcatgttccttcaacaacttgtggattcggttatcaacctgaccagagatgccccagaaaaattgatctccgaggtaaataccgattccgtagtagtcactgttcttggtgagattttacaaacttgtattggcgccactgttactgactcgttgatactcaaaatttcgcagtacgtcatgaacatgttgttcgtacgaaccaattcctccttaactcaaaacactttagtcttcctgttggacaagttgtgtgagttaagccccttcaccgccaaggatatcagttggtggctggttcacgctgaagacgaacgtaagtacaacaagaatgtgatgagagacttgattttgctgggcttggttcctctcgcagagcttgacaggtctctggccattcaaatcgagaagaaaaacgtcaaagcagttctgtttaccatctatctcatccacgactctatcttgtctgaggacccaattgctttgcgcgccgacttgataaattccattgaagctctacaggtgttggcccatgaaccatctgaaatcggtagaaaggcttacatgagtatttcaagactaaaggccatcgttaagtctaactcgatccaaatctttaagatgtttggcacttccacgatctctaaaaagcaatacatgtcttatgtgtttgctgaatgggttaaattggtacagtatagtcgtgtcaatagagtcttggaagatttcatttggcaattggttgatgatggtattgttaacaactctgagaatttaagcctgttaatcacaaccgcgacagaaatgtccgttgccgccttctctaaggaggctgatccaagcaagaagcttcatattgaaacttacgctcctgctgacgcattagcgctactgttggtcaagctacttttgatgcaagaggatagtacaggtgttgaaagaaaaacttttttcaactcaatgcttgctgtcattgttctagcttttgcctctgaccataacaataattcaacttcttttaacgagagaccatacttcaggatattttcatcgttattttcttactggttaagtgccagacatgagttcgaggatggagatgacgaaagcttaaagaccttcaatagcgagctgtatcttatattagcccaaaacctgatggttatgcagccatcatcctttccaggtttcactttcgcttggatttccctgatctctcatagaatgtttatgcctatgattcttgaagtgccagagaataaaggctggggtcgtttcgtcaatctactgcaatgtttattgtctttccaactacactatgttgacagtgaaaagatctcagatgttgttaatgttgtttacaagggaactctgagaattattgctttactttcccatgactttcctgatctattggttcaataccactaccagttaattagttccactccggagtcatatgtccaactgaaaaatatcatctcatcagcctaccctaagggcattacagttccgaatcctttccagcagggtttgaaggtcgacagattggaagagatcaaacaagagccacctattggttaccatccagagtctgatttgacagccaagggacttaagaagccagtggagtcctatctgcggattccaagtcaatctttactaaagactatcagcactggtctatctgtggccgagccaagaaacggtaagtccaaatacgacgctggtcttgtcaacgcagtagtgttctttgtgggaattgcagctgttgaagaacagaaatcgttcagagacggttcgtccttcgacagcacctcaaaccatgttatgttgttatcttcacttatcaaggatggtgacgtcgagctccaaaatctgatcttgacagctatcgccaaccaattgagatatcctaactcacacactcactggtttagttgcattctgttgcacttcgttggttctgccaccctttggggagaccaacgtgaggctattaagttcaacatttcatgtgttttgaccaagagagctatgtcttacaacccaatcccttggggtatcctcgttaccttcttggagcttgtatcaaattcagaatatgaaattttttcctctccattcatcaagggtgatgctactctagagcgtctttttggtactttgcaacaccacgtcagaaatcagaagcctatcgacgaacaaccagagccattgaagttgtaa

SEQ ID NO: 4019 - DNA, 900 bp, Artificial Sequence
  Optimized genes for Pichia pastoris
atggctttggccattccgcagattgggtttggaactggtaccacttggtacaagtatggtagagagtccgagattgaccaaaccttggtggacgcattagtaagcgcattgcaagttggtattacccacttggacggtgctgaatgttatggaaccgcacttgaaaccagagatgctattaagaaggctaacatcccaagagaaaagttgtggatcactgaaaagtactacgctggtgattcttctcacaagtctaaatcaaaagcagccaaccctctggctgccctgaaagaaatactaaggctagaagaacttgagtatgtggatttgtatttgctccattcaccttacatcaccaaggagactcatggatttacactggaagaggcctggggttacttagaggaggctcaaagtctaggcttagccaaaaatattggtgtttccaacttcactgttgctgacttggagaagatcttgaaggtcgccaaggttaagccacaagtcaaccaaattgaatacaacgctttccttcaggaccagactccaggtgtcgttgagttttctcaaaagaatggtatcctgatcgaagcttattcccccttggctcctctttacaaaggtgacaagtccatcaaggaagtgaaggagttcttggattacgtttatgagcttggcaaaaaatacggaaagtcagatacacaggtcctgttaaaatgggtattacagaagggaattattccaattactacctcgacgaagactgagagagtcaaggaattcctcaagattgatgacttccaattggagccatctgaagttgaaaaaatcacaactttgggtgccaaagctccagttgtccgtcaatactgggttcctgagtactctaagtttgattaa

SEQ ID NO: 4020 - DNA, 456 bp, Artificial Sequence
  Optimized genes for Pichia pastoris
atgggtagaatgcactcaagtggaaaaggtatctctgccagtgcattaccatactcccgaaatcctccttcttggttcaagttgactccagatgacgttgttcagcaagtcatcaaatatgctagaaagggtttaaccccatctcaaattggagttttgctgagagatgctcatggtgttgctcaaaccagatttatcaccggtaacaagattctgcgtattttgaaatccaatggcttggcacccgccattccagaagatctgtattacttgatcaagaaggctgttagcgtacgtaagcacttggagagaaacagaaaagacaaggactccaagttcagattgattcttattgagtcaaggatacatcgtcttgccagatactacagaactgtctcggtgctacctccaaactggaagtacgaatctgctactgcttctacactcgtcaactaa

SEQ ID NO: 4021 - DNA, 855 bp, Artificial Sequence
  Optimized genes for Pichia pastoris
atgagaaatgacaagatatccctatattctcctgactactacttggcttgtactgttggtggcgcactggcctgcgctccaactcatggtggaattacgccgcttgatttagtcaaatgcagaagacaagtcaattcatcattgtactcctccaactggaagggtatcacctccattattaagaacgaaggtttcccagcactgtataccggtgtcctgcccaccttcatcggttatggtttgcaaggtgctgccaagtacggtggctatgagtacttcaagaagcaatacactgatttgaacggtggtaaggccaacacttttactttcttggcagcctctgctactgctgagtttattgctgatatctttttgtgtccattagaagctatgaaggtcaagattcaaacaacattacctcctgataagccaaacttgagggaattaagtctgtacaaagggctcgttcctctttggtgtcgtcagattccttacaccatggtgaaattcaccagttttgagaaaattgtcgacttgatttactctaaggctatcaagaaaccaaaggaccaactatctaaccttcagcaaactgccgtatcgtttacaggaggttacatcgctggtattttctgtgctgctgtttctcacccagccgatgtgatggtttccttgatgaacaacaataaagagggactgtctgttgcccagctttatcagaagatcggatttagcgggttgtggaatggacttggaatcagaattgttatgattggtactttgaccggattccaatggttgatctacgactctttcaaagtttattcaggacttccaaccactggtggtcactaa

SEQ ID NO: 4022 - DNA, 1089 bp, Artificial Sequence
  Optimized genes for Pichia pastoris
atgttgtttccaagagagaccacttgctctactgagtccgacttcaatggtgagcacatgggtgccagaatttcatcagtcttcgtaattttggtcacctctatgtttggtgctttcttcccaatcctatccagtcgttactctttcatccgactcccggactggtgtttctttattgctaagtttttcggatctggtgtcatcatcgcaactgcttttatccacttgttgcagcccgccaacgaagctttgtctgatgagtgtctcggagaaggttttgaggactacccatatgcatttgccattgcattagtatccatcttcgtgatgtgtttcggtgaactgatgaccttcagattcatggatcataaattggaagttgctgaggagaagcaaatcaacgctgacaagatctcgaaacttgagaatgaagaagatgatgaagtgggtactggcctagatttgaacactcagccagcgcctgaacctcaacaaatgaacccagaaaacaccttggagaaccactttgctcatcagaatgagcatcaagatattgaaaatgtcggaactttggttgacaacaacctggaatcttacaagtctcaatttataagtgttttggtgttagagtttggaattatttttcattctgtctttgttggtttgactcttgctacttccggtgacgaatttacaaccctgtaccctgtcattgttttccaccagatgttcgagggtctggggcttggcacgaggattgccgccactccatggccacacaacagaagacttacaccttggttcttcgcattggcttatggattaaccacccctattgctatcgctattggtttaggtgttagacactcatacgctgctggttcatccactgccttgatcacaaatggatgctttgatgctgttagcgcaggtattcttatttatactggtcttgttgaattgatggcccatgagttcattttctccacccaattcaacggtaaaggaggattgaagcgtctgttgtgggcctacgccatcatgtgtttgggaacaggcctaatggctctgttaggtaagtgggcttaa

SEQ ID NO: 4023 - DNA, 771 bp, Artificial Sequence
  Optimized genes for Pichia pastoris
atggctgtagggaaaaacaagagattgtctaagggaaaaaaaggcctgaaaaagaaggttgtggatccatttcaacgtaaggaatggtacgacattaaagcacctaccacctttgagaacagaaatgtcggaaaaactttgatcaacaaaagcacgggactaaagaatgctgttgatggtttgaagggtcgtgtcgtggaggtcagtttggctgatttacagggttctgaagatcactctttcaagaagatcaaactgagggttgacgaagtccaaggaaagaacctccttaccaactttcacggtttcgacttcacttcagacaaggtccgatctttggtcagaaaatggcaatctttagttgaggccaatgttactgtgaagactgctgacgactacgttttgagaattttctgtattgctttcaccagaagacaccaaaaccagatcaagaagacaacttatgcccagtcctcacaactgtcggccatcagaaagaagatggttgaaatcatgcaaagagaagtttccaatgtaacattagctcaattgacctccaagttgattccagaggttattggaagagagattgagaaggctgctgaaggtatttacccccttcagaacgttcatatacgtaaagtcaaggtgcttaagcaggccaagtttgatttgggtgcattgctagcccttcatggtgagagtgtcactgaggaaaacggtaagaaagttggttccgagttccaagatgttgttctggaaactgtctaa

SEQ ID NO: 4024 - DNA, 987 bp, Artificial Sequence
  Optimized genes for Pichia pastoris
atggttgtcgccattgagggaggcaccggtttgggtctgatgaacttaacatggaagccaactcctacacccattgacgatgctattgaaacgatcaggtatgctgtcgaagaggctggtgttagatacttgaatggaggtgaattctacaactttcctttggactccaacctaaatttgcaatacattcaggagttcgccaagagatatccagaactgtacaagaaggtatcgttatcagtaaaaggtgctgtttcccttgttgatgtgtcgcccgattcttctccagagaaccttgagaagtctataagtaacatcaccaagcatttgcctaacaacttccttccaattttcgagccagcaagaatcgacaagcgttactctatcgaggaaaccatcaagaacctgtccaaatttgtggaagacggtagaattggtggtatcagtctttctgaagttggtgccgacactatcagaagagctgccaaagtggctccaattgcatgtgttgaggttgaattttcactattaaccagagacattttgcacaacggtgtcttggcagcttgtgaagatttgaacattccaatcattgcctattctcctctgggacgtggtttcttgactggaactattaattccaaggctgatattcctgaaggtgatatccgtctctccttggagagattcaacgatgatgaggtcatcgaacataatttaaaactagtccacggcctcaagaagattgctgacaaaaagggagtcactttggcccaattgagccttgcttggttgagaaagttcggtgacaagcacgtcaaggttttgccaataccgtcatgcagctccccaagacgtgttgctgaaaacactaaggaaatttctctgacagactctgagtttcaagagattaccgattttgctgagtctgttcctatcaaaggaggacgatacaataaagcatcagaggccgttctgaatgggtaa

SEQ ID NO: 4025 - DNA, 1938 bp, Artificial Sequence
  Optimized genes for Pichia pastoris
atgcctgctgttggtatcgatctaggtaccacctatagttgcgtagctcattttgccaatgatagggtggaaatcatcgcaaacgatcaaggtaacagaaccacaccatcttttgttgcctttactgatactgaacgtctcattggtgatgctgcaaagaatcaagctgctatgaacccagccaacactgtgtttgatgctaagcgtcttattggaagaaagttctctgatgcagaaacacaggccgacatcaagcacttcccattcaaagttgttgataagggcggcaagcctaacattcaggttgagttcaagggagagacaaaggtgttcactccagaagaaatttcgtcaatggttcttactaagatgaaggacacagccgaacaatttctgggtgacaaggtcaatgacgcagttgtcaccgttcccgcttacttcaacgattctcaaagacaggcaacgaaggacgctggtttgatcgccggacttaatgtcatgagaattatcaacgaacccacagcagctgccattgcctacggtctggacaagaaggctgaaggtgagaaaaatgtattaattttcgacttagggggcggaactttcgatgtgagtttgctgtcgatagaggacggtatttttgaagttaaagctactgctggggacactcacttgggtggagaagattttgacaatcgcctcgttaaccatttcattgctgaattcaagagaaaaaacaagaaagatctttcatcaaaccagagagctttgcgtaggttgagaacagcttgtgagcgtgcaaaaagaactttgtccagctctgctcaaacctctattgagattgactcccttttcgaaggagttgacttctacacttcattgaccagagctcgtttcgaggaattgtgtggtgacttgttcagatctactatcgaacctgttgaaaaagtgctgaaagacgccaagttggacaagtcccaagtcaacgagatcgtattagttggaggttccactagaatccctaaggtccaaaagctggtttccgatttctttaacggtaaggagccaaaccgttctatcaatccagatgaggcagtcgcttatggtgctgccgttcaggctgctatcctaagcggcgacacctcctccaagacccaagaccttctcttgttggatgttgctcctctgagtttaggaatagaaaccgctggtggtattatgacaaaattgattccaagaaatagcaccatcccaaccaagaagtctgagacgttttcaacttatgctgacaaccagccaggtgtactaattcaagtttatgagggcgagagagccaagacagcagataacaacctgttgggaaaatttgagttatccggtatcccgccagctccaagaggtgttccacagatcgaggtcacttttgacatggatgccaatggaattttgaacgtctcggctgtcgagaagggtactggtaaagcccaacaaattactattaccaacgacaaaggtagattgtcaaaagaagacattgaggccatgatttctgaagctgagaagtacaaggatgaggatgaaaaggaagcagcccgaatccaagctagaaacgctttagaatcttactctttctccttgaagaacaccttgaatgagaaggaagtcggtgaaaagcttgatgctgctgataaagagtctttgactaaagctatagacgagactacttcttggattgatgaaaaccaaacggccaccactgaggagtttgaagccaaacagaaggagttggagggtgtcgctaatcctatcatgaccaagttttaccaagccaatggtggagctccaggaggagccgctcctggaggtttccctggtgccgccggtgctggagcagaggctcccggcgcggatggtcctactgtcgaagaggtggactaa

SEQ ID NO: 4026 - DNA, 906 bp, Artificial Sequence
  Optimized genes for Pichia pastoris
atgggtggtttgtcatttgagcgtcagtctacctcaattctgaagaacttggacaacccaattgagcaagaggaaatcagaactcctgagccagaaatggaagtcaaggaaaccgttgaaggtgtgcccatggctctgtcgggctcgacaagttccaccaagtccaaccctgatattaacaacactgttgtcaatccagagtctcttgtaccgccccctcctccagttgactctgttcctttcaagttgaacaagcaatctgtgctgagcgacttcttgaaacagaacagactggcaactgaaaggatcaatgaatactctccagctattattgaatcaaatggaactggtcaacagcctcatacattgtggattggttgctctgactccagaatttctgaggcctgcttaggtgttatgccaggtgaagttttcactcacagaaacatctgtaatattgtcaactccaatgatttctccgtcactggagcaattcaatttgccgttgatgtcatcaaagttaagaagatcattgtttgtggtcacaccgactgtggaggagtttgggctgccctaagctccaagcgtataggaggtgtccttgatctttggttaaatcctgtcagacacgtacgagctcaaaaccgtaaagaattgtctttgatcaaggacccaaaggagaaatgtgctaccttagccagattgaatcttatcaactcagtgcaacaattgaagagacatccatcttgtttggctgctttgaaaaaccaggacgttgagatttatggattgatgtacgatgttggtacgggcctactcagtgaagtagagatcccatgtgatgatgagtttgacgatgtgttccacgtcggtgaccatgatgacactgaggctggtgggcattaa

SEQ ID NO: 4027 - DNA, 1440 bp, Artificial Sequence
  Optimized genes for Pichia pastoris
atgtcacttcaagaggccgtcaaggaaattcaatcttcctttgatgtttcacaggaagtgttgcaacgttcagtggacaagttcattgaattggcaaaaaaaggcttggccagcaatgaagacaaactgggtatgccaatgcttcctgcttacgtcacacaggttccttctggaaaggagaaaggaacatatttggcagctgacttgggaggaactaacttcagagtctgcagtgttcacttgaagggagacaataccttcaaccttgttcaacaaaagtctccaattccagctgatatgatggtcggtactggtgatcaattgtttgcctatcttgcctcgaagatcagaaagtttttggaagagcaccacggtgacgcgctagaggctgcacatgaaactaattccagagctaactacttgaaattgggttttactttctctttccccactgctcaacattctctagattctggttctttggtcagatggactaaaggtttcaatatacctgatgtggtagaccaggatgtcgtccagctacttcagaaacatttggatgcaggcaagattcctgttcatgttgctgcccttgctaatgacactgtcggcacattactcagccgtgcttactcagccaatgccattgctggtggtaagcaaggtgagactatcatcggtgcaatttttggaacagggaccaacggtgcttatctggaaaagctggataacatcaagaagcttccggaggcagtagtgaaggatttaaaggctaagggtgttacccacatggttatcaacactgaatggggttccttcgacaacagattggaagttctgcccacgacgaaatacgacagagacgtcgatgctttgaccgccaacccaggtattcatctgttcgagaagagagtttccggaatgttcatgggagagattttgagaaacattttagttgacttccactccagggggctcgtgtttacccaatacccaaactttgagtccctccctcacagactgagaaccccatgggatttggactctgaaaacttgtctttatttgaagtggatgactccaaggacatgaagccaactgaggtaactttgctgcaagctttgcgattgccaaccactttagaggagagacaggctatccaggcattaaccagagccatcagtaggcgttcggcctacatttctgctgttccaatcgctgctataatcatgttgacaggagctttagaaggtcaccatattgaggttgatattggtgtcgacggtagtgtcgttgagttctaccctggctatcgtaccatgctacgtgatgccttggctcttactcaaattggaaccaagggtgaaagaagaactcacatcaatattgccaaagatggttcaggagttggtgccgctctgtgtgcttccgtttctatctaa

SEQ ID NO: 4028 - DNA, 354 bp, Artificial Sequence
  Optimized genes for Pichia pastoris
atgtctgaccaaggtagaaaggacttcactgataaagtttctgaaggtttgaaaccagattcccagaagacttatttggaacaaactaaggagactctaaccgatgccggagacaaggctgctaacaagctgacacctgaagagcaaaagggatttggtcaacgtgttggtgatgctgtcaagaacggtaaagatgaggcagacaaagagacccaaccaacccttgtagaacaggtgcagaacactgccggtgacgcattagaggctggtaaggaagctttggccaatacaagtgagtacatttcaggagctttctctggcgccaagaatggtgctgactccaccaagaaataa

SEQ ID NO: 4029 - DNA, 648 bp, Artificial Sequence
  Optimized genes for Pichia pastoris
atgtctgaagactacagactcgtagttgttggtcctcccagtgtcggcaaatcagcattgactattcaattgatccgtggtgagtttttgacggaatatgacccaaccatagaggattcttacaagcacccatgtgagattgatggtgctccagtgatgctggatattttggacaccgctggtcaagaggactattcgtccatgaaagagctttacatgaagaccggagagggattccttttggttttcgcaatcaacaagaggtcgtccttagaagagctgaaaccattttacgaccaaattgtccgtgtgaaggagggtatgcaatctgttccaatggtcctagtcggaaacaaatctgatgttgaagattcaaaaagagaagtttccagagatgaaggtgaagctttagccagacagtttggatgtcagtatattgaaacttctgccaagactaatacaaatgtcaaggaagccttctacaacgttgtcagagctaccaagtctatcaaggataccaaccagactggtatcgacacttccgttgaccgatccaagaaccatgagaagcctacagtaagaggtaatgctactgctcctgcctcttcctctgacagcagttcatcaggctgctgtattgttatgtaa

SEQ ID NO: 4030 - DNA, 981 bp, Artificial Sequence
  Optimized genes for Pichia pastoris
atgaagactcagatcgactacaagttttacccaaccaaggaagttacaattatttccgctccattctctgctggtcaaggtaagggaggcgtggagaaaggaccaggtctgctgttaaaacatggtttgcgtgaagatctggaggctctcggatggtctgtcagtataaaagagccattgaagggtaccggcttagacgttcctccttccgaattggaggaggaatttgacagatcacatggaatagccaaaagaccaactgttgttgcccaagctactgagagagtttacagagctgtcaaggaggtttctcaccaaaagaggctccccctgaccatcggtggtgaccactccattggtgtctcaaccctagcaggattcttggacgctaatcctgatgcctgtgttttgtggattgatgctcatgccgatatcaacactcctgaaacgagcccttctggtaacatccacggttttccggtggctcttgccatgggtcttagtcgagaagtatggccaaagcagttctcctggttagatgaagctaagaacaagttggctgctgaccgtatcgcttacattggattgagagacttggacccatgtgagaagaagagagtccgtgagcttgggatcgcagcatattcaatgtaccacgttgacaagtacggtattgcaaaagtggtagaaatggctttggccagaattaacccaacaggcaaatctccagttcatatctcgtatgatgttgatgcgctagatcctttgttcacccctgcaaccggaactcccgtcagaggtggattgacctttcgcgaaggtatgtatattgttgaggccgttgctgaaactggtaatttgggtgctctggatattgtcgagtgcaatccagatcttgcttccactgatgtccacgaaattgacactatcactgctggatgtgccattgccaagtctgccttcggtgagacattagtctaa

SEQ ID NO: 4031 - DNA, 969 bp, Artificial Sequence
  Optimized genes for Pichia pastoris
atgactgatgctgctgcccccaagaagcctcaaaagaacactgctgttgacttgctggcaggtggtaccgctggattatttgaggcactctgctgtcatcctttggacactatcaaagttcgtatgcagttatatcgaagaactagtgccaatgctggcgttaagccaccaggattcattaaaaccggattgggaatagcagccaaggaaacacctatggctctgtacaagggtcttggtgccgttgttatcggaatcgttccaaagatgggtatcagattctcttcttacgagttctacaaacgtcaattggctgacaaagagggaaagaattccactcttaccactttcatctcaggagtcggagccggtgttactgaggcttgtttggtggttaacccaatggaagtcgtcaagattcgtcttcaggcccagcaccattcaatgtctgacccgctagatattcctaaatatagaaacgctttgcacgctggttacttgattgttagggaagagggtttcaagacattatacagaggtgtaaccttgaccgcagccagacaagctaccaaccaaggtgtcaactttaccgtctactccaagatcaaggagagattgcaggagtaccaacaattagaagttcttccctcttggcaaacaagcctggtaggtctattgtccggtgctcttgggcctctatcgaatgccccattggatactattaagaccagaatgcaaagagaaactggtgtgacgaatgaaagtggcgttgctaggattttgagaatttctaagagactgattcaagaggaaggtatgcgtgcgctgtataaaggcatcactccaagaatcatgagagtcgctccaggtcaggcagtgacatttactgtgtatgagttgatgaaggatgttttggtcaaactcccaattattggtaacgaagattcccaggaactggtcattgagtaa

SEQ ID NO: 4032 - DNA, 456 bp, Artificial Sequence
  Optimized genes for Pichia pastoris
atgtctgaggactgggattcggtgacggttatcggcagaaaggctagagttggtggttccggaccaagagagaacatcgctcgtacaaagggtgctatcaacgaagcaagaagaactggatcagtcattgctgtcgaaaaaaaatatggttctggtaactccaagtctgacccagaaggtcaaaaattgaccaaaattgatcgtgaaactgatgttgttcctcctaagaagattgacgccaatgtgggaaaggccattagtaaagcaaggttggacaagaaacttactcaaaaggaattagccaccaagatcaatgagaaaccaaacgttgtcaatgactacgaggctggaagagctgttcccaaccaacagctgttggccaagatggagcgtgtactaggggtcaagttgagaggtaagaatattggtgatcctctgttcccaaagaagaactaa

SEQ ID NO: 4033 - DNA, 1914 bp, Artificial Sequence
  Optimized genes for Pichia pastoris
atgttgagtgttagaagacagttgatgtcaggaagatcttggttctccactacttctgttgccagaaaggtctactctgctcaacaggatgttaaaggaaccaacgcttctatagccatggctaaagactaccacattattgaccatgagtatgattgtgtggttgtgggcgccggtggagccggactgcgtgccgcgtttggcttagccaaagaaggattcaagacagcttgtatttcaaaactttttcctaccagaagtcatactgttgctgctcagggtggaattaacgccgctcttggtaacatgcataaagatgattggcactggcatatgtatgacaccgtgaagggttctgactggttgggtgaccaagatgctattcactacatgactcgtgaggccccagactccatcattgagctagagcactatggtgttccattttcaaggactgaagaaggtagaatctaccagagagcatttggtggtcaatccaaggagtacggaaagggaggccaagcttatcgtacctgtgcagtcgctgacagaactggtcacgctctgctccacactctgtatggccagtctttgagacataatactcatttcttcattgaatttttcgctatggacttattaatgcacgacggtaagtgtgttggttgcattgcttacaaccaagaagatggtaccattcatagatttaaggctcacaagactatcatcgcaaccggtggttacggtagagcctacttctcttgtacttcggcacatacctgcacaggtgatggtttcggtatggtttcccgagcaggtctgccattggaggatttagagtttattcagttccacccttccggtatctatggatcgggttgtttgatcaccgaaggtgctagaggagagggaggatttttggttaattctgagggagagagattcatggaaagatacgctccaaccgccaaggaccttgcatgcagagatgtagtgtccagagctatcactatggagatcaatgaaggccgtggtgttggacctttgaaggatcacatgtaccttcaattgtcacacttgcctgcttccgttctgcatgaaaggttaccaggtatttctgaaacagcccatattttcgcaggggtcgacgtcacaaaggagccaattccaatcttgccaacagttcattataatatgggtggtgtacccaccaaatggtctggtgaagccttaacacttgatgaagacggaaatgacaaggttgttgaaggtttgttggcctgtggtgaggctggatgtgcctctgtccacggtgccaacagactgggggcaaattcactcctcgacttggtcgtcttcgggagggctgttgctcatacaataagagactgtcttacgcctaacactcctcataaggaacttccggcagatattggttttgagtctattgccaatttggatcgcgtaaggacggctgatggagatatcagtactgccgatcttcgattggaaatgcaaagaaccatgcagaaacacatcagcgtgttcagaacccaagacatcatggatgagggtgtcaagcaaatcaacgaaattgataagaagtttgctaacatcaagaccactgaccgttccatgatttggaactctgatctggtagaaaccctagaattgcaaaacctgttgacttgtgctactcaaactgctaaaagtgcttccgtcagaaaagagagcagaggtgctcacgcccgtgacgatttcccagagcgtgatgacgagaactggatgaagcactccctatcatggcaacacaagtctggctcacctgttgagttgaactacagaaacgtcattactgagactttggacgaagctgagtgcaagccagttcctcccacggtccgtgcttactaa

SEQ ID NO: 4034 - DNA, 933 bp, Artificial Sequence
  Optimized genes for Pichia pastoris
atgcaaattttcgtaaagactttgactggtaagaccatcaccttagaagtggaaagttccgacaccattgacaatgtcaagtccaagattcaggataaggaagggatcccacctgatcaacagagattgatctttgcaggcaagcagctggaagatggccgcaccttgtctgactacaacattcaaaaggaatccactttgcacttggtgctaagactaaggggtggaatgcaaatcttcgttaagactctaacgggtaagacaattactttggaggttgagtcctctgatacaatcgataacgttaagtcaaaaatccaggacaaggagggaattcctccagatcagcagcgtcttatttttgccggaaagcaacttgaggacggtcgtacactgtcagattacaacattcagaaagagagtactctgcatttggtcttgagattgagaggtggtatgcaaatatttgtaaaaacattgaccggtaagaccatcactttagaggtcgagtcttccgatactatcgacaacgtcaagtctaaaattcaagataaagagggtattccacctgaccagcaacgtttgattttcgctggaaagcaattggaagacggaagaaccctttctgactacaatattcaaaaggagtctacccttcatctggttcttcgtctgagaggaggtatgcagatcttcgtcaagacattaactggaaaaaccataacgttggaagttgaaagctcagacactattgataatgttaaatctaagatccaagacaaggaaggtatccccccagaccaacaaagactgatttttgctggtaaacaactggaggatggtagaactctctcggattataacatccaaaaagaatcaactcttcacttagttttgcgattaagaggtggtgagttgtgttccattgtttaa

SEQ ID NO: 4035 - DNA, 1866 bp, Artificial Sequence
  Optimized genes for Pichia pastoris
atgggtaaagattacactcctttggttgccactatcgatatcggtaccacatcaacacgtgctatcttgttcgactaccatggccaggaagttgctaagcaccaaatcgagtattcgacgagtgctcaagatgacatcaagagaaagcgttcccagatcatctcctccgaaggaatttctttaactgtttctgatgatcttgaagtggagagcgtagataataaggcaggccccactctgcagtttcctcaacctggatgggttgaatgcagaccttcacacattttagccaatgccgttcagtgcttagctgcttgcttggtcaccatggagaacaagaaccttgaccgtgacgagaaaaataagtacaagttgatttcaattggtgtcgccaacatgcgtgaaactaccgtcgtctggtctaagaagaccggaaagccactttacaacggtattgtttggaacgatacaagaaacaacgacattgtagacgaatacaccgctaaatattctgagaaggagagagaggagatgagaactctttgtggttgtccaatttccacttacttctccgctaccaagtttagatggttacttaaacatgtcccagaagtcaagcaagcttacgataacgctgatggggacttgatgtttggtacaattgactcttggttgatctatcatctcacaaatgaaaagtctcacgttactgatgttaccaatgctagcagaaccaacttcatgaacattgagactaacaaatacgacgaccgattactaaagttctgggatgtcgacacatccaaggttattcttccagagatccgttcgtcggctgaggtttacggacacttcaaggtccctcatttggagagtattggctatgtcgaatcttatttgactgacgatgccttggccctgttggagaccatagagggtgccccattagcgggatgtttgggtgaccagtctgccagtctggtgggtcaactggctgttagaaaaggagatgctaagtgtacatatggaactggagcctttttgttgtacaatacaggtgatcaaacgctaataagtgagcacggtgctttgaccaccgttggttactggtttccggggttagatgagtctgaagatggtaagcattcttccaaaccacaatacgctctggagggatccattgctgtagccggctctgttgttcaatggctgagagacaatttgcgcctcatatcaaaagctcaggacgtcggtccattggcatctcaagttgacaacagtggtggtgtggtattcgttcctgctttttctggtttgtttgctccatattgggactccaactccagaggtactattttcggtctgacccaatatacgagcgcatcccacatcgctcgtgcagctctagaaggtgtttgtttccagaccagagccattttgaaggccatgatctcagatgcaggagcttctgctgacttcttggaagagtcatcaaaggctactggtcacaatcctctttctgtgctggcagttgatggaggtatgtccaagtccgatgaaatgatgcaaattcaagccgatattcttggaccatgtgtcactgtcagaagatctatcaaccccgaatgtaccgcacttggtgctgccattgccgctggtttcggcgttccaaaggaagacagaatctggggttctttgaaagagtgtactgaagctattctggaaggtaacaagatgtacttggctgctggaaacacttcattggactttaaagcaactttgtcggatgaggtgaggaggaaagaatggagattgtgggaaaatgcaatcgccaaagccaagggttggctcaaggacactgcttaa

SEQ ID NO: 4036 - DNA, 1116 bp, Artificial Sequence
  Optimized genes for Pichia pastoris
atgtcttcctctgagatcattgaaaacactgcgctccttcagaagtaccagtcattagaccagcgtggtaagattattgccgaatatatttggattgatgcatccggaggcataaggtccaagggaagaactttaagtaagaagccatcttcgattgacgatcttcccgaatggaactttgacggatcatccaccggtcaagctccaggtcacgattctgacgtttacctacgtcctgtttcttactacgctgacccattcagacgaggcgataatattgttgtcttagctgagtgttggaataatgatggtactccaaacaaattcaaccaccgtcatgaatgtgccaaattgatgaaggctcataaagatcaagaggtctggttcggtttggagcaagaatacactctattggacaagtatgacaatgtgtatgcttggccaaagggtggtttcccagctcctcaaggtccttattactgtggtgtcggtaccgggaaagtctacgccagagacatgattgaggctcactacagagcctgcattcatgctggtatcaacatcagtggaataaatgctgaagttatgccttctcaatgggaattccaagttggtccgtgcaatggaatcgacatgggtgaccaattgtgggttgcaaggtatctgttgcaaagagtcgcagaggagtttggaatcaagatctctttccatccaaaaccattgaaaggagactggaacggtgccggttgtcacaccaacgtttccacatctgctatgagagtacctggaggtatgaaatacatcgaagctgccgtggagaagttggccaagagacacttggaacacattgctctttatggatctgataacgaacagcgtctgacaggccgccatgagacggcatcaatgacttcgtttagcagcggcgtggccaacagaggtgcttcaatcagaattccaagatctgttgctaaggaaggttatggttactttgaagatagaagacctgcatccaacattgatccctacctggtcactggtatcatggttgagaccatctgtggagccattcctgatgctgatatgaccaaggagtacaagcgtgagtccgactaa

SEQ ID NO: 4037 - DNA, 465 bp, Artificial Sequence
  Optimized genes for Pichia pastoris
atggttaaggctgttgccgtgctaagaggtgattccaccgttggtggtactgtcgtatttgaacagtcttctgagagttcaccaactaccatcacttacgacatcaagggaaattccccaaacgctgaaaggggattccacattcatcaatttggtgacaataccaacggttgcacgtcggccggtcctcacttcaaccctttcggtaagactcacggtgcacccacagatgaggcccgtcatgtcggagatttaggtaacgtcaagaccgatgctgagggagtggccaagggtgttattactgacaaccaagttaaactgataggtgaaacttcaattttgggtagaactgttgttatccatgatggtaccgacgatcttggcaaaggaggacacgcagactctttgaaaacaggcaatgctggtggaagaccagcttgtggtgtcattggtttggctgcttaa

SEQ ID NO: 4038 - DNA, 1029 bp, Artificial Sequence
  Optimized genes for Pichia pastoris
atggttaaggttaccgtctgcggtgccgccggcggaattggtcaaccactttccttgatgttcaagttgaatccttacgttacgacacttgcgttgtatgatgttgtgaacgttcctggagttggtaaggatctatcccatattgatacagacaccaagttagagtcttacttgcctgaaaatgatggtcttgagaaggccctcaccggaagtgacttggttatcattccagctggtgttccaagaaagccaggtatgaccagggatgatctgtttgccatcaacgctggtatcatcagagatttggccaatgggatcgctcaatttgctccttctgctttcgttttggtcatctctaacccagtcaactccactgtcccaattgttgccgagattcttaagaagaacaacgtcttcaaccctcaaaaattatttggtgtcaccactttggactgtgtcagagctaacacctttgttgctgaactcagcaaagacaaggaggcttcagcatttgacactcgtgtactgggaggacactctggtgagaccatagtgcccgtgttctctcagtcggctccagaagtatataaggaactttcggacgaacagaaagcagcactagttcacagagtccaattcggtggtgatgaagttgtcaaggctaagaatggagcaggctctgccactttatcaatggcttacgctggatacaagttgggtcatgctctgttggctgccattaatgacacaccgaatattattgagtcaactttcgtctacttaaaagatagtaagatcaaaggtgctgctgaggcattcaaatatatcaatgaaaagctgaaagattcagactcttccgacgttgacttctttgcactacccgtggtgctgtcttccaacggtattgaagagatcaagtgggacattttggagaaagttgatgccaaagaaactgagttgttgaagattgctactggtcagttgtccaagaacattgccaagggaactgcttttatagccggtaactaa

SEQ ID NO: 4039 - DNA, 1878 bp, Artificial Sequence
  Optimized genes for Pichia pastoris
atgtccaacaccaaagaaaccggtctatttgaaactggttccacatcttctgaaaacgaaaaacagtcaatttccgacaatgaaattgcagagtcactcgatcagcagaatattttgactcaatactccgaagaggacgtcatgtcaatggggaggaactatgctatcaagcatggattagatccagacttgtttgccaagggtgcagccatcgctcgtaaccctatcggttacaaccgtatggagttcttgtcgcaggaggaaaaggagatcttgtatcaagaggagcaccaaaagtggaagctgcctaagaaattgtactatttgatcatcatggccagtatgggtgcttgtgtccagggtatggatgagtctgtgataaatggtgccaacttgacatatcctgctggtttagggattggttctgactccgagcgtgactcttggcttcagggattggtcaacagtgctccttacatctgttgtggtctgatcagctgttggatgaccgatgcttggaatgcccgtctgggaagaaaatggaccattttctggacttgtttcatttctgcaattacatgcttctggcaaggtttctgtaatacatggtaccacttgtttattgccagattcatgttgggctttggaattggaccaaagtctgccactatccccgtttacgccgctgaatgtgttccccacaagattcgtggagctttagtaatgatgtggcaaatgtggactgcttttggtattatgttgggttatgttttctccctagcgttccacaaggttcctgaccacggtattggtggtggaggacttgcatggagactaatgctcggctcggccatgctgccagctattgtggtatgcttgcaagtctggtcttgcccagaatctccaagatggttgatgggaaaagagagacatgccgaggcttatgaatccctgaaagttttacgcaaccatcctgttcaagctgcaagagacactttctatcagaacgttctcctgatggaagaaaattcatacacttccatgggatttttcggtaagcttaaggaaatggttgttgtcaggcgaaacagaaacggtgctatgggcgctggtatcgtgatgttcatgcaacagttttgtggtatcaatgtcattgcttactactcatccagcatctttgttgaatcaggatttactgagacgagtgcattgttggcttcatggggttttggaatgatcaactggttatttgctttgcccgcagtcttcactattgatttggccggtagaagaactttgttactaataacgttcccattgatgtctatgatgcttctactggctggattctctttttggatcccagaggagaatgagaaggctagagttggtgttgtgagccttggcatttatctttttgcagccatttactcgtccggtgaaggtccagttccattcacctactctgctgagtgtgctccactttacattagagatgtagttatgagttttgctactgccacctgctggttcttcaactctgttcttgccttaacctggccatctctgaagaatgctttcaaggtccaaggcgccttcggattctacgctgcctggaacatcgtcggtttctttttggtgttaatgtttcttcctgaaacaaaaggtttgaccttggaggaattggacgatgtgtttgacgttccgacttggcaacatgcttcttaccaattgaagaagatgtggattaacattcaaagaaatataatcagaaaggatgtcgagccaatgcctcctctgtacaagcaccacagaatggctctgaccaacgctcaatgggaagagaaacatgaagttgagttggtagagaacgtctaa

SEQ ID NO: 4040 - DNA, 4512 bp, Artificial Sequence
  Optimized genes for Pichia pastoris
atgtcatccacctcttcttccatcaacgacaaagataaagagtcctcaaatatagactctcctaaggatactgtcccttacgagccaactaggttcgttggtgatttggaaaaccagaacgaggatgatatctacagcgaacaattatctagaattttgactcaatcggaagcagttcaaaagatccaaagtctcgctaggactatgtctcgtatgactaagaaggagttggctgcttttgaagttaatcaggatgacttcgacttaaaaattctgctgcattatcttcgcgccaaatccgaagaacaaggaattgagtcttgttctgcgggggtagccttcaagaacttgaccgcgacggggattgacgtcagtgccgcctacggtcctactgtggatgaaatgctccgtaacttttttatgtggccaatcagatttgcaaaacgggagcacgtcaaaaccagacaaattattagaaacttcactggctcaattgaagctggtgaattgtgtttggtgttgggaagaccaggtgctggatgctctactttgttgaaatgctgtactggaaacacttctgagcttctgtctgttgaaggtgagttctcttatgacggtctggaccaggcagagatgatgaaggattacaagggctacgtcatttacaaccctgaactggatacccacttcccacacatcactgttaaacagaccatcgatttcgctctaaagatgaaaactccagctaaacgtgtggatggaatcccaagaaagaagtacattgataccatgagagacctttggtgcactgtatttggtttgagacacacatacggaactaaagtcggtaacgattttattcgtggtgtctctggaggagagcgtaagagagttagcattgtcgaagccttggccacaggagcttctgtctacgcttgggacaacgctaccagaggattggatgcttccactgctctggaattcacccaagctatcagaacttcaactaacctgttaaatgcctcgggtatggttgcaatctatcaggctggtgagaacatttatgaactatttgacaaggtatgcgtattgtataatggtaagcaagtttactttggaccggccgaaaaggctcgtaagtattttgaagacatgggatggtacaagcctcctagaatgacaaccccagaatttcttactgcagtcactgatccaagcggcagattcattcgagaaggattcaaaaacaaggttccagagaatagtgaggactttgagcaatactggttgaactcaccggagtaccaagagtgtctgagatctcacgaccaatatattcaagatcataaccctgaggagactcgtcaacgtcttgccacggcaaagtctcaaacaagacagaaggccgtcagatccaagagccgtttcgttgcctcatacccaaatcaaatcgcttactgtgttactagaggtttccaaagaacaaagggagaaattgcgtacactctggtttacctttcatcgtttttgacaaaaggtttcattgttggatcaatgtattggaatattccaaaggacacttccgggttgttttcacgatctggtatcctgttctactgccttttattttgtgctgttaccagcttgtcagagatttcccacacttacaccaatcgaccaattatcttgaagcagaaatcttactctttgtaccaccaatccgctgagtctctgcaggagatcataactgaactccctaccaaactagtagcagtgattatattggcactcaccacttatttcatgcctggtctacgactgagtgatggtggttccgcattctggatgtacctgttgttcttgttgttgattcagcaatgtatgtcctttatgttcaaactgattgctacgttaaccagagatgccggtaccgctcatgcctgtggtggactcctggctttaatgatgtgtgtctacactggtttcatcattcctttgccatacatgcatcactggatcaaatggtttaactggattaatccaatgagatactgttatgaatctctattggccacagaacttcattcacgtgagatgaagtgtagtgagtacattccaaacggaccagactatgagggtatctccatggaaaattccgcatgtacaactactgcttacaaccatactaccggtttagtctccggaaatgctttcttgaccgcaacgtacaattaccgttactcacacgtttggagaaacttcggtatcaatattgcctggactgccggatttatcatcatcaacacaattttgtcggagtttgttaagaacgttgaggggggtggtgatatgttgctgtacaaaagaggtcatatgcccaaggaaggtattgaggctgttgatggcaaggtggcctctaagcaagaaatgatggaggcattgaatggacctgacgttgacctgaagaaagtaattgcagaacgtgacgtgtttacatggcaacacttggactacgttattccttatggaggtgcaacaaggcaattgctcaatgatgttcaaggttatgtgaaaccaggtacaatgaccgctcttatgggtgaaagtggtgctggtaagaccacattacttaataccctttcccaaagaatcaactttggcactattactggagatatttttgttaacggtcgtccattggattcttctttcaagagaagaactggttttgtccaacaatccgatttacatttggctgaatactcggttagggaatccttgagatttgctgtcaacttaaggcagagcgagaaagttcctcaggccgagaagtacgaatatgttgagaagataataaatcttctgggaatgcaaaactatgctgaggccatcattggaaagattggtaggggactgaacgtcgagcagagaaaaaagttaagtattgctgtggagttggttgctaagccatctttactactctttttggacgagcccacatctgggcttgacagtcaatctgcttggtccattatccagttcctcagagccttatctgactccggtcaagccattctatgtaccattcatcaaccctctgccactcttttcgaagtcttcgacagattgctgttgttgaagaagggtggtagaaccgtttatttcggtgacattggcccgaattcatctaccatgctttcttactttgagagagaatcaggtattaagtgcggagtttctgaaaacccagctgaatacatcttgaactgtatcggtgccggcgctacagctcacgcttcagctgactggggtgacttgtgggtttccagtccagaacatgctgccgttactgaggaaatctctcgcctcaacaccgagttacagaagcgtcctttacccgagaacatcgaagatttgcagtccaaatttgccacctcatatcctcatcagatcaagattctttttttaagaacgatggtgcagttttggagaagccccgtgtatattagagctaagttcttggaggctgtcgtctgcgctatttttgtgggcttcagtttcgtcaaggttggtcacggtctacaggaagctcagtttggtcttacgtctattttcatgatgctgatcatttctttggccatgattaaccaaatgcacgttttcgcctttgattcaagagaattgttcgaggctagagagagtgcttccaacactttccattggtctacattgctactggcccaaacctggtgggaaactatctggtgtatggcttgtcagttcctttgctttgtttgctattacttccctgctggcttttctggtactgcccaccacgccggttacttcttccttcaatttgtcatcatctttcctatctactactgttcctatggtctgtgggttctgtatttctccccagatgtcccatcggcaggtatgatcaactccaatttttttgctgctatgttgttattctgtggtgttttgcaaccacctcaattcatgccaggattctggaccttcatgtacaaattgtctccatatacttacttcgtgcaatcttttgtagctccattagttcacaacagaaagttggtctgtcgtacaaatgaatataccttgatcaccccccccgagggacaaacttgttcggagtttctagacccattcatagagtcagatggtggatacttgggtaatcctgatgcaaccgaatcctgtgagtattgtccatacacctaccagtctcaggtcatggaacagttcaatatcaagtggagttacagatggaggaacttcggcttctttttcgcttatataattttcaactacgttgctttgctttcgtgttactatttgatgcgtgtcaaggtctggaacatgaagtccattctaaatttcaagaaatggttcaacggtccaagaaaggaaagacatgaccctgaaaccaacatcttcgcagctcaacctgccgacgccaagcttgctgtacttaagaagaaggagtaa

SEQ ID NO: 4041 - DNA, 396 bp, Artificial Sequence
  Optimized genes for Pichia pastoris
atgatgaccctgttgcaattgctggtgctagtctacatcatttacaaggttttcccaattttacgtagattctttagcacgggaaccatggtttctgaacaagtgctttccaagactaaggctttgatcaaggatcataaagtatttgttgcttccaaatcttattgcccttactgttctcagaccaagaagttgttggaatcgctcaatgccaatgctttcgtcgttgagttggacactgagccagatggatcagatattcaagctgccttattagagcttactggtcaaagaactgttcctaacgtctttatcaacggtgagcacgttggtggtaactctgacttgcaggcattgaacagtgaaggcaaattgaagacacttctgaagaactaa

SEQ ID NO: 4042 - DNA, 963 bp, Artificial Sequence
  Optimized genes for Pichia pastoris
atgcctgcaattgtagatccatctttccaaacgaaccacgtttgtcttcatgtttccgacattcagaagtctatcaaattttacactgaatactttggactgtcattattggcccaagagtctgtgccacagttaaaaaagcaaatatatctgttaggctacaactctccgagcaatgcaaactacggaaagcactgggctgaccgttccggtgtcctggaactttgcgtggaccaaactttgcccaaggactacaagtttgccaatggtaatagtccagaggctcaaggattcggtcacatctgtgttgctgtcgacaacttggaaactgcttgtgagcaattggaaaagaacggtgtagcctttaagaagagaccttctgaaggtagacaaaaggatattgcatttgctttggacccagataattactggattgaattgatcgagcatcagattggtaagaaggatggagtctccaacaaatccaattgggttttgaaccatggaatgtacagaatcagagatccaaaggtttctttgaagttctacaaagaagttcttggtatgaagctgtactcgaccagagagttcccagaagctaaattcaccctatattttctcggctatgaacatgatgaccagtatgttgagaaccaggagaagcctcgtcctcaagctgaaagggaatccatcattgagctgacacacaactggggtactgagtcagactctagtttcaagggttaccacaccaacaccacagagccatttgggtatggacacactggtatcaagactaaagacgtcgccaaacttgctaaggagttggagaatgatgttgaatgggtcttcaagctaggtgagatttctgacaagcttgccttcttcaaagatcctgatggttatcttttagaaattttgcagaacgattcattcttgaaagatcaaggtaacaagttgtaa

SEQ ID NO: 4043 - DNA, 198 bp, Artificial Sequence
  Optimized genes for Pichia pastoris
atgcaattcaagtctattgtgctaacattggctgctgtcactgttgctcaggccaacaacttgtccaatgaaagtaatggcaccaaccattccaaccacacctcatctgttccaactggtgctgccgtcagagcttctggtatgggtgcaggacttctgggagctggtgttgttgccggtgtagcattattgatctaa

SEQ ID NO: 4044 - DNA, 1056 bp, Artificial Sequence
  Optimized genes for Pichia pastoris
atggttaccaaggagtcaattatttccgatctagagaaggaaaacgttggaccagagtttggtgaattcctgaatagtctgcaaactgacctcaattcagaaaaacccctcattgagcaagtcaaatcgcagttggagacccacttcaacttgggacctgaaacccaagagttctccagaaagaatgataatgctccagttgaccaactgttaaccaactattacaacaattatgaggttaatgtattagaatttgtgctacagatgggtttctgtaaggatctgtccattcctttgaatgtctggtttgttttggatatgatttctcagctttcaacttccaagcaagatttgccgttagattactatttagtgcttaataactctcatactggtaagtactctgactttgtcagatatctgatctacgaggctgttggtgctgagattcactgttttgaacaaggagacatgccacagcaatacagatcttccaggtgggaagacaaggttaaaggtccagctttggctaacagaggtcctatccgaggaaacgtcggtgccggtgaccgtaagatcactttccatttgctgtgcaagaaaacagccagaatgatccttgtgggggatgacagagaaactgattttgagatgtctgatcgttctttcgttacgctcctattagactactaccaacgtgtcggcacaacaaaaaagattgaccttcttcttttgactaacaactacgacaccaatatgaacaacaagttgcaacaattgaaaattttggaatctttgaacatgttgaaatcaaactgttacgtcctggactaccagattaccgctgatcaagttactgccaactttaattcttacgttgaaggtatccctgcattcagacgtcatgaaattgcaaacttcttgaagaagagaagaactccaaagaacgccgatgagttgatcttcaaatacgtaggaagatggaacatctgttatcagaagaagttccaccaaggtaacattagcatccaccagataagtggctatttggactaa

SEQ ID NO: 4045 - DNA, 1347 bp, Artificial Sequence
  Optimized genes for Pichia pastoris
atgtctgccccattgagtccgttaattcaacaaatggtttccttgatggaagccagaaccaacggagctgatcctggaactggaattctccccaggttgaactctgctgccgacatgcttggcggtgttgacagaattccaagagaattgattaattacgttcaaggtaagcaattggcgttatttggagactacccatctggaaaggacactgctccaagcgcaatattcatggtggtatttttctttatttttctagctcacttgactctgttcggtatcaactggtccagaggtcacaagtttttactctcatttggttttgccttctatgctctattgagagtcgtgggatttgctttgcgtgttgcttggtctagagagatcactagagttcaggtcggtattgcttctgaggtctttcttattattcctacaattttgttggcatctttcaatttaatccttgctcaaagactgtttacatggagacatccatacgtggggtcgtcgaaacttttctggggtgctcttctgaccgtctactctgtggtaatttcagttgttgtcatgaccatcgtagctgctgtcgttccttatgtctatctgctttcacatcgtaactatgaaatgtccaagaacgtcgtcaaggttagctccattctagtcatcctgtactccctgttggctactggtttgatccttgtttcttatttgttcaagccaaccaagagagacaagggttgcctgatctaccaacctacctggttggagtctttttctcctacttacttccctttgaaagattccgccaaacagcatgaacagattttcattggtagaaacggtgcagcagctttcgcatccactcgtatcattgcctcttcttaccactacaatgcccaatctgatgttttgccagagcccactgctgagaacctgaaactcgagccaggtaacgaagacaacttggtcagatatagcagttccaccggtcaacttaagcacaactactcaattataattgttactttgacaacgacgtttatcttgatcggtgccgttttcagagccatcacctgtttcctggatcgcacagtggagacccagtcttggatcttcaaacccgtagtgatgtacatgttgtggggattcttggaaactgttatcaatgttatttatttactaggccgaattgatttaagattctacagacctgatcgtttcccaaaggatatgttagttggcaatgaagctgttgagccttccccagtcatttccaacaaggaaagaacttcaagtataagtgagaggacatcaaatccagaaatcgttcgtaccgtttaa

SEQ ID NO: 4046 - DNA, 378 bp, Artificial Sequence
  Optimized genes for Pichia pastoris
atgtctgaagaagaggagttgaaagttttcacctttgaagaagttgagcaacacaaggccaatgatgactgttggattgtttacaacggtaaggtgtatgatgtcacatcatatattgaggagcatccaggtggtgaggaagtcatcctggaatgtggtggagctgatgccactgagcctttcgacgacatcggacacagtgaggatgctcatgagatcttggccaaattgctcctaggaagagtagaaggtgctccagtcaaggcttctgtgtcttctgcttccactgctgaagactcgggctcatccaacaatcttttacttgcagtcctggttgcaattttggctggtgttgcctactactttttcaaccagtaa

SEQ ID NO: 4047 - DNA, 879 bp, Artificial Sequence
  Optimized genes for Pichia pastoris
atgccaactcagatcatggctccatgggctcctgctctcgctggatccattgcacgtgaattggaaaaacagccttttgtgagtttccaatttgccaccgtggatgaacacggctctcctcatgtcagaactgtcattcaccgcggatttttatttgatgacagaagcaccaacgttttgacttttaccacagaccgaagaatgaccaagtacaaggagttgttcaatgattctgcctttgagctttgcttctactctcacgttgccagaaagcaattcagactgcgtggtgttgctagatgtattgatgataccaccacaccaaagttgaagctcccgcccgatatcttcgaccaactgaagaactctgcagaggccacagtaacgttgattgctgacaacgataatgaaattgagactgacaagattgactatttgaaattcccaagatctactgcttctgacgagttagaatatcctcttttatccccagaggtcatcgccaagctagaagcttcatccggggaggaaggtcttgacccagaagagatttcagcacagctgaccccacccacagaagaagaatggaagaatgagagaagaagaatctggaacactttgtccagatcgatcaaatccactttcaggaaacctactccaggttctcgtctaactgaggagaagatcaagctgttggactcaataggaagaggtgtcgatggtgctagtgatgaggatggattggagaacttggttgtcgttgtactgttcgttgacaaagtcgactttgttgatattggttacaacggtcaaggtcgtcgtttgatctacagacgtcttgctggtgatcattggagagaaactgccgtttgtccttaa

SEQ ID NO: 4048 - DNA, 1380 bp, Artificial Sequence
  Optimized genes for Pichia pastoris
atgggtaaggagaagttgcacgtcaacgttgtggtaattggtcatgttgacgcaggcaaatccacaacgactggacacttgatctacaaatgtggtggtattgacaagcgtactattgaaaagttcgagaaagaagctgaagagttgggtaaaggttcattcaagtacgcttgggttttggacaagctgaaagctgagagagaaagaggtatcaccattgatatcgctttgtggaagtttgagactccaaagtatcatgtcaccgtcatcgatgctccaggtcacagagatttcattaagaacatgattacaggtacctcccaagctgattgtgctattctcgtaatagccagtggtatcggtgagtttgaagcaggaattagtaaggatggtcagaccagagagcatgccttgcttgccttcactttgggagtgaagcagctaattgttgccatcaacaagatggattccgttaaatggtctcaaaagagatacgaagaaatcgtgaaagaaacttctaacttcatcaaaaaagttggttacaacccaaagacagttccttttgttccaatttcgggctggaacggtgacaatatgatcgagccaagctcaaactgtgactggtacaagggatgggaaaaagagacaaaggctggaggtgccactaagggtaaaactttactagaagccattgactctatcgaccctccctccagaccaactgataagcctcttcgattaccactgcaggatgtctacaagattggaggaataggaactgtccccgtgggacgtgttgagaccggtgtgatcaaggccggtatggttgttacttttgccccggcgggggtaacgacagaagtcaaatctgttgaaatgcaccatgaacaattggagcaaggtgtcccaggcgataatgtggggttcaatgttaagaatgtctctgtaaaggaaattaggcgtggtaacgtctgcggagattctaaaaatgatcctcctaaggctgccgagtctttcaacgctcaagttatcattttgaaccatccaggacaaatttcagcaggctatgctcctgttctggactgtcacactgctcacattgcttgcaagtttgacgagttaattgagaagatcgacagaagaaccggaaagaagaccgaggaaaatcctaaatttatcaagtctggtgatgccgcaattgtcaagcttgtgccctccaagccaatgtgtgtcgaggctttcaccgattatccacctctgggtcgttttgctgttagagacatgagacaaactgttgctgtcggtgttattaaatcggttgtcaagactgacaaagcaggtaaggttaccaaggctgctcagaaggcagccaagaaataa

SEQ ID NO: 4049 - DNA, 1674 bp, Artificial Sequence
  Optimized genes for Pichia pastoris
atggctccaactgctatcgacttgcaacaagtttctgatgaagattaccaaacaaaaatcaaaaaggctacttcaccttcttactctgtaattgcttctctgggattgaatccagaggctgttataaggcacaatgctgctgtcccgacattatatgaagacggtttgttggagaagggtaccgccatttcttctaccggtgctttgatggcttactccggaaagaagactggccgctcgccgaaagataagagaatcgtcgacgaagaaacatcaacggagcacatttggtggggtcctgttaacaagaaggttgatgagttgacctggaagatttccaaggcccgagctattgattatttgagaactagagagaaaatttacgttatcgatgcttttgctggatgggatccaagataccgtataaaagtacgtgttgtttgtgcccgtgcctaccacgctctttttatgaagaacatgttgatcagacccactgaggaggaacttcaaaactttggcgaaccagatttcactatctggaacgccggtcaattcccagctaacgttcacactaaaggtatgactagctccacttccgtcgagatcaacttcaagtccatggagatggtcatcttaggaactgaatatgcaggagaaatgaagaagggtatctttactgtaatgttctacctaatgcctattaggcataaagttttaacgctacattcttccgccaaccaaggtgtccagaataaggatgttactttgttcttcgggctcagtggtactggaaaaacaacccttagtgcagatcccaacagaaagttgattggtgacgacgagcattgttggtctgacaacggtgtgtttaacattgagggtggatgctatgccaagtgtttggacttgtcgggggaaaaagaacctgagattttcaatgcaatcaagtttggttctgtcttggaaaatgtgggatacgacccagtcaccaagatcgtggactattatgacaaatccattaccgagaatacaagatgtgcttatccaattgactacattcctagtgcgctgatcccatgtactgttgactctcaccctaagaatatcgtgctactgacctgtgatgccagaggtgtgcttcctccaatctcaaagctgacaaatgcccaagtcatgtaccattttatttcgggttacaccagcaaaatggccggcacagaggatggaataacggagccagaagctaccttttctgcttgtttcggtcagccattcttggttctccatccaatgaaatacgctcaacagctttcagacaagatgattcagcacgagtctactgcatggttattgaacaccggctggactggtagttcagcaactaagggaggttcacgttgccccctgaaatataccagaagaattttggattccatccactctggtgaactggcaaaggctgagtacaagaactacccaaccttcggtctgcagattccaaaggaagtcccaggtgttcctaccgaaattcttgatccttccaacaactgggttgatggtaaggacaatttcaacactgaggtcagaaacttggctcagttattcatggaaaactttgaaaagtacgcctctgagtgcaccactgaagttattcaagccggacctcaattgtaa

SEQ ID NO: 4050 - DNA, 1071 bp, Artificial Sequence
  Optimized genes for Pichia pastoris
atgaccttcttcagaaggtcgttgcaatcttctaaatccaactctactacaagcatatcatcattgtacgccacacctaactccgtagacactttgactccagagttcgtccctgaagtcattgatgacgagttgaacagtctacacttcaagttcaccaactttgcgttggacgatgaagttgttgatattgcctctgaaactgctactgaggcttccggtgttgcaaccatgaagacttcccctagtttgagaactggctcagatgtcaaatggtgtgttttgctggtggggctaccagcttctggaaagagtactgttgtcagacaattgaagcagtatttaacaactggtaccaaacaaaagtgtcgtgttgaaatctacaatgctggtaacgttcgcaggtctcaacatccaaagagagctgattctggtttctttgagtttggatcaacctctaccaacggacgactgagagagacttttgccagagatacccttgccatgttgttgggtgatttgcagaatgaccatgttgacattggtatcctggatgctaccaattcaacgcgtgagcgtcgtaagtcgttattggaacagatccacgctgtttccccgtccactaacatccaaacgctcattttggaggtacagtgcacaaacaagtcaatgagaagatttaacattgagagaaaggctcagaacgctgactacattcatattccaagagacgttgctgtcaaggactttttcaacagagtccaagtctacgagtctcactttgagccagtgtctgctcaagagcttgcatcattaaaactgccttacctttccatgattaatgttggtgaagagatcatctataattttgaaaatgccaagcaaactgacttctccctggaagatccaattttcttgttaatctgttcttttgtgacagaatacagaacccaatatgctccaacttacttgatgactcttaaatctttctacgctagtgaatatgcacctctcgtgagcacaccccttgctttcgcagccacttctgccgaaaccgcctccacccagtaa

SEQ ID NO: 4051 - DNA, 3966 bp, Artificial Sequence
  Optimized genes for Pichia pastoris
atgtccagtgagaaggagtctccatctgaatcgaaatctagtcaagtgttgaacattcccaaaaacgagcgtgtcaggttaactgttcgtaacttgcaagtcactttgaaagcccagaagaaaaaacagtctcttcttaagcgattgagaaagtctgagaaagacaatactattgacgaagaggctcttcctcaaaaaaagattatcagcaatgtcaatttggacttgaaggaaggcgagctgatagcgattttgggtgcctctggatctggtaagaccaccttgttgaacactctatctcaaaaggtcaccaaaaataagtctttcttgttctccggaatgattaagtataacgaaaacacagacatcgagaggatcagacacgcttacatgagtcagaccgatttctttcttccaaacttgaccgtctacgaaacattggattatgcagccaagctgaaacttcccaggaactacactaatgctgaaagaaccgagcttgttgaatctatcttggtcgaattgggtctggatagaattagagagtccattatttgtaacagtttcggcagcatctacatctctggaggtgagcaaagattggtttcaatggccttacagttgctgaacaaaccaggacttttgtttttggatgagccaacaactggtctagatgcaacctcttctttcagaatcattactgctttgcacaagttgtctagaaactttggtatgactatcgttctgacaattcaccaacctcgttacgagatcttggaacagatcgaccgtatctgcattctaacacgaggatgtcgtgttatctacaatggttctcctctgaacagcattgagtatttcaaaaacatcggtcacgacattccgagaaacgttaacctgaccgactacttgttggatatcagttgcaaggactcatcttccccagaaaatgagtcccaatctttagctagaattgagtacctggcttcaaaatgggaaaaacatgagccttctactctggacgagggtgtcgaggtgatggattcattcacccattcttcgaactccgaaaaagctttgactgaaatagagaagcgtattacgctaatcaaacaaattaggattctgaccaagagaacatttatcctgtctttgagagacagaggttccatgcttaccttcaacttttcaattttgatcatgggggttgcttgtggttggttatttttcaagccacctgctgacttaggtggcatcagatcaatagtgtcacaggtttatgttgttttggagttgattggatttgtccctatgatccttgaaattacccgtttatgggattttgatggacaggcatttctccgagagaattcagaaggttatgtctctgttaccggatggattatttccagaagattagccaaatttcctattgaagatttccccactagtattttcttcgcccttatcacctactttatgttcggattaagaactgataacggagcttctaacttcctgatctatttcgttgtgactttattcgtcaacctttgcgctgtcgccctagcaacgttgtgtttcgccgttgggtcggattttgctagttcctctctgatgtgtaatgttatttatcaactgcagaactctagttgcggatactttattaatgccaagactatgcctgtctacgtcagatggttgaaatactgtgctcatttctggtacgcttttggatgcttgatgtcaaaccaattcactgactggatgggtgattgtccaaccgaaggggatgcctgtgtggaatactctggtatttaccaattagaaatctttggcttcggtgaaaattggattacactgccaatctgtgttttgctggcattctttcttggtaccctcgtcttgtccggtttcattcttaggtacaagaacactgaggtttcgatgtctaaagagatcacttctaacatgttttccaagagaagcaaggatcgtaagaagcacgaggagaaagatgttccagctgatgacaacttccacgccataagcacagcaagaagagaaattagtttaaatctctatgtgtcaaatgtaagcttgtacgtttacccatcaagattgaatctgggcgtgtttaccattttgtggaagtacattaacaatagatatttaaagttcggtgttgagaaggttgagaacacccccaagtcggctaagtccaagagactactaaccaatgtgaatgcaaagttcattccaggtagattgaacgccatcatgggtccttccggatcaggaaagagtacgcttctgaattatattgccggacgcctctccaaagaatccaatttttacaccacaggagaagtcattgttaatgatattgctatgagatctatggacaagcctttaaagaagctttgttcctatgtacttcaaaatgactctgccttgattcctactttgactgtacgtgagactgtccactttcaagctcagctgagattgcctaaggaaaagcaaatcgatggtggtattgacagaatcattgatgacttattgctcaaattcggtttgttggactgtcagaatattccaattggcgacgactatacaaagggtattagcggtggagagagaaaaagggtctctattgtggttcaattgttagacgattctaagatcctcctattagatgaaccaacttcgggtcttgattccttcacttcctcatcaatcctatcaactttagaggaatatgccattgaacaaaacaagctcataattatgaccatccatcaaccaaagaaggagatttttgaaaagtttggtaacgtggtattgctcgccagaggtggttacgttgtatacaacgattctgctgtaaagattgcagattacttctctagtcttggctatgacgttcctccaatgacaaacgttgccgactttgttcttgacatggtttccaacaacattgatgagagacctgaagaatcagatgctcgtcttcgtcgtttggtagaaacttggcaagagaaccatgaatccgacttccagagagttcagactaacaccacaatcaagatatctaatgaagaccaatttgacgctcaattttctcatttgtaccagaacagagctgctgataatgtctccttaccagttctgataaaacgtcttactttgaccacgtttagagatcaaggtgttgttgcagctcgcctttatcaggttatggctctgtgtgtcattcatgctttgttctatgctccattgaagaacggtgctgacggtatctccaacagactgggtttgatcttccaagttctcaatttatactacgccggtttcatcaacaacatctcactgttcccacaagtcaagcaattgctttacaacgaatgggaggaccagatttactccctagaatccttttttgcctcctacttcctattggagatcccattcgagctattctgttcttttttgtatgctgttttcttggtaatggtaattggtctcccgcggaccgctggtatgttgtttactactttctacgcgtcgtttgttgccatgaactgtggtgagtcatttggtatcctgtttaacactcttttcaacaagttggacgtggctatcaacgtgctgtccaactgcttaatcatcggcatattcatggctggagtcatgtctatccacatgccagagttcttcaaggcttggaactggatcaatcctttgaagtacattgttggtgtcgttgctaaattgggattcgctggtcaaacttttaagtgtgagattggtgacgaatgtgccttatccactggagatgatgtcttgcgttattacagattggaccacaatttcagtgctttcatgggagcattggccgtctgctttgttgtctatagatttgtgtcttacgtcttccttgcaattcgtctgaagatgtcgtaa

SEQ ID NO: 4052 - DNA, 1212 bp, Artificial Sequence
  Optimized genes for Pichia pastoris
atggctggtaacttgaaagatattttgtctctatccagaaagactgccagaaacctcaagcaagcacttgatgagttggccgagcaagttatcaaccatcagcgtcgtagaccagcactagtaagagtcccaattaacaacaatttgcgacgtaagtctcagcagtcattcctgaataggagatctttccacttgtggacttctaagtacaacccttacttctggagaggtggtagatccaatgttttggatcaattgaacagagaagctctgagataccgttcttcctttgccaaaccaggtttctacccctccggcctttatcagtccacgtttcctcaacgtggatccagaatgttttccacttgtgcttactcttgtcagcaagaagccgtcaagaacctgacttctgccgttagagctttgttgcaatccggtgccaactttggttcccaaatgaagcagatgaaacactgttctcaaaagaagaaacatttctctaaattctccaagagattgacctcgtcaactgctgctggaagtggtaagaatgctgaacaagctccatctggactggctgagggatctgctgtcgtgtttagtttagaacgccagtctcacaacactgaacttgagggtatcctggaccaagagacttcatcaatattggaagaggaaatggttcaacatgagagacatctggccattatcagagaggagattcaaagaatttctgaaaatttggggagtcttccattgatcatgtctggtcacaagattgaagttttcttcccaaactgtgacactgtcaaatgcgaacagttgatgagagacttggctattaccaagggtgttgtcagaagacacgactctacagcagagcactcctcaagtaggtcgtttgttcctgaagattgcctatattcatctggcagcagttctcctaacccccttagctctacctcatccaagtcatttgatcgtgtttctttggactacatctcttcgaggagtacttccgaccagaccaccggatctgagtatacaagtctctcacaacaataccatttagtttccaactataatccggtattatcctctgcacctggaagctctcgtgtcttagagctgaacaccccagaatcgacaatggaaggtagcacagatttggagtacttaaccagagatgacgtgcttcttttgaatgtgtaa

SEQ ID NO: 4053 - DNA, 336 bp, Artificial Sequence
  Optimized genes for Pichia pastoris
atgttgatcccaaaggaagacagaaagaagattcaccaacacttgttccaagaaggtgttgtggtagccaaaaaagattttgagatccagcatgaagagattggaaccaagaatctttacgttatcaaggctcttcagtctttgacttccaagggttacgtcaaaacacagttttcttggcaatactactattactcattaactgacgatggtctagaatatctgcgtgagtatttgaacattccagagggaattgtccctaagactttgttgcaagagccagttcctgaaaggctgccccgtagaggtggtgagagaagattcaccagaaactaa

SEQ ID NO: 4054 - DNA, 717 bp, Artificial Sequence
  Optimized genes for Pichia pastoris
atgaagttgaacattgctttcccagctaatggaacccaaaagtgtatcgaaattgacgatgagcacaagctgcaggcattttatgagaagagaatgggtcaagaagttgaaggtgactctgtatccgacgagttcaaaggttacgttttcaagatcactggtggtaacgacaaacaaggatttcctatgaaacagggtgtcatgcacccaaccagagtccgtctattgctgtccaagggtcactcttgttacagaccaagacgtgttggtgagagaaaacgtaaatctgtcagaggttgcattgttgccgctgatctctcggtgctttcattagttgtcgtacgtcaaggtgaacaacaaattgaaggattaactgatgcccaggttccaaagaaacttggccctaagcgcgcaaacaacatcagaaagttctttgggcttactaaggaagatgatgttaggcaatttgttattagaagagaggtggtcaagggagacaagacttataccaaggctcctaaaatccaaagactgataacacccgaaagaattcagcgaaagcaacatttgcgtgagttgaagtacgagaatgccagaagacagaaggatgctgctgccgagtacgccaaattgttggctgaaaagattcatcagagaaacgctgagaaagccgaaatcaagaagcgtagggcaagttcattgagagctgaggcttaa

SEQ ID NO: 4055 - DNA, 2493 bp, Artificial Sequence
  Optimized genes for Pichia pastoris
atggttaacgaaaagaaacctctcttggatgcttctggaacagagaatggccctgaggatttaacggccactgctatcctgagaaagaagaagaaggacaatgctcttattgtcgacgacgcaatttctgacgacaactcagtcattggcatgtcttccaacactatggaattgctgcaattgttcagaggtgataccgtgttggtcaagggaaagaagagaaaggatacggttctgattgttcttgctgatgacgatattgaagatggcgcttgtagagtgaatagggtagtgagaaacaacttgagagtcagattgggtgacattgtaactgttcatccttgccctgatatcaagtacgcctccagaatttcagttttgccaattgctgacactatcgagggattgaccggttccttatttgacgtttatttgaaaccatactttgttgaggcttacagaccagttagaaaaggggacactttcaccgtgaggggcggtatgagacaagtggaattcaaggttatggatgttgaaccggatcaatacgcaatcgttgctcaagatactgtgattcactccgaaggtgaaccattgaaccgtgaagatgaggaaaacaatatcaatgaagttggttatgatgacatcggtggttgtcgtaagcaaatggctcagattagagagctagtagagctgccccttagacatccacagctgttcaaagctattggtattaagcctccaaagggtatcttgatgtatggaccaccaggtaccggcaaaacactgatggccagagctgttgccaatgagaccggagcatttttcttcctgatcaacggtccagagatcatgtccaagatggctggtgaaagtgaaagcaaccttcggtctgcttttgaagaggccgagaagaatgccccttccattatttttattgatgaaattgactcaattgctccaaaaagagacaaaacaaatggtgaggtcgagagacgtgttgtttctcaacttttgactcttatggacggaatgaaagctcgttctaacatcgtggttattgctgcaactaacagacctaattctattgatccagctttgaggcgttttggtcgtttcgatcgtgaggttgacataggaattccagatgtcactggtagattggaatgtttgagaatccacactaagaacatgaagctggctgaggacatcgatcttgaatccatagcacaagagactcacggttacgtcggtgccgacattgcatcgttgtgttctgaagctgctatgcaacaaatcagagaaaaaatggatttgattgaccttgacgaagacaccatcgatgccgaagtcttagactctcttggtgttaccatggagaactttagatttgcacttggaaattcgaacccatctgccctcagggaaacagtggtggagagtgtcaatgtcacatgggatgatattggaggtttggactccatcaagaacgagttgaaggaaaccgttgaatatccagtcttgcacccagaccagtttgctaagtttggtttatctccatccaaaggagtccttttctttggtcctcctggtactggtaagacattgttggccaaggccgttgcaaccgaagtatccgctaacttcatttcggtcaaaggtccggaactgctatcaatgtacttcggtgagtccgagagcaatataagagatatcttcgacaaggctagagccgctgccccaactgtcgtcttcttggacgagttagatagtatagcaaaggctagaggaaactctttgggagatgctggaggagcttcagacagagttgtcaaccagctgctcacagaaatggacggtatgaacgccaagaaaaatgtttttatcattggtgctaccaaccgacccgaccaaattgacccagccattttacgcccaggacgactagatcagttgatctacgttcctctacccgatgagcctgcacgtctgagcattttgcaagctcaattaaggaaatctcctatcgaacctggacttgatttgcaggagattgccaagatcaccaagggtttctctggtgcagatctatcctatattgcccaacgtgctgctaaatttgccatcaaagattctatcgacgcccagaagcgtttgctagaggagaaagccacccacaagttggagtcttctgaggacattgagatgactgaggctaagcaggatggtgaagaagttgatgaccctgtcccattcatctctcatattcatttccaagaagccatgaagactgcgaagagatcagtaagtgacgctgaactcagaagatacgaggcatacgctcaacagttacagagttcgcgtggtcaattcactgacttcaagttcaacgatttaggagaatcagctggtaacgggggtagtatcggggctgagtcatcaggacctgcctttggcaacgttgagcccgatgatgatgacctgtactcctaa

SEQ ID NO: 4056 - DNA, 402 bp, Artificial Sequence
  Optimized genes for Pichia pastoris
atgagtgccccgaccgtggaagttgaagagttaaactggaggctggttgaagtcggccgggtagtgttgatcaacaacaagctggcagccatagtggacatcattgatcagaaacgagttttagtggacgggccctcaactgatgtagagaggcaggtcgcgaggttacaagatatcgagctcacgtttctagtcctcgactcagtttcacgtggggacaattctgatgcagtaaaagaagcatgggatgcttccgacatatcctctcagtgggcatcctccgattgggccaaagacatagctcagaaacaacgaagaagtgaactaaacgatttcgaacggtttcaggtacagttacttcaaaagcagcgctctctggctatcggatcggctgcgaagtaa

SEQ ID NO: 4057 - DNA, 1422 bp, Artificial Sequence
  Optimized genes for Pichia pastoris
atggtggagggcaatgttcttgttataagtaacagagtgccagtcaccatcaagaaaggttctgacgggaattatcaatataacatgtcgtccgggggtctcgttacggctctacaaggtctcaaacaaaaattccaatggtttggatggcctggactggaggttccggctatcgaccaggagaaagtgaactccgacctaaaggagaagttcaactgttttcctatctacttgtcggatgagattgcagagctacattacaacggtttctcgaacagtattctttggccactctttcattaccacccgggggaaatgaattttgacgaggctgcatgggcggcttatatagaagcgaacagacagttttgtaaagttatcgttggaaaaatcgcggataacgatctggtatggatccatgactatcatctaatgttgcttcctcaaatgctacggcggcaaattgacgagcaaggtctgaaaaatgtccgtttgggtttttttttacatacaccgttcccatcgtcagaaatctatcggatacttccagtgaggaaggagattttggagggcgttctatcctgcgatttgataggttttcacacgtatgattacgcacggcactttacaagctccgtcgaacgcatactgggatgtcgcacgacacctactggactaacctatggttcacacaacgtgtcagtcggggcttatccaatcggcatcgacgttgacaagtttaccacgggcattaagcagcatcttgtccaagaacgtattcacagcctgcagaaacgcttcggacaaggcgttaagttgatcgtaggtgtagatcggcttgattatatcaaaggagtaccacaaaagctccatgcttttgagatctttttacaagagcatcctgaatggatcggaaaagtcgttctagtgcaagtcgcggttccctctcggggggacgtagaggagtatcagacacttagagccactgtaaacgaactcgtaggcaggatcaacggacaatttggtaccattgaattcgtgccaatccactttatgcataagagtgtaccattcgaagagttaatttctctttatgcggtctcagacatctgtcttgtgtcgagcacgcgagatggtatgaacttggtcagttatgaatacattgcttgtcaacaacagaaaaaaggctctttgattctaagcgaatttgctggagctgcacaatccttgaatggcgccatcgtagtcaacccctggaatacagaggagctctctgaggctatttacgaagcgctttctttacccgaggaaaaaagggagtcaagctttgagtcaatgttcaagtacatctccaagtacaccgccgcctactggggtgagaacttcgttaaggagttgacgagggtcggcaataacatgtaa

SEQ ID NO: 4058 - DNA, 2691 bp, Artificial Sequence
  Optimized genes for Pichia pastoris
atgtctgccgaggagcctacaaaggagaaaattccgatcaatcacagcgacgatgaagatgaagacattgaccagctcattgaagacctgcaaagcgtacacgggttcgatgatgaggaagaggaagagcatcacgaaggagcaaccgcgaagcccgtgcctgaggagttgctgcaaacggaccccgcgtacgggctgactactgacgaggttcacaaaaggcgtaagcggttcggcgagaacaagatggctgaagagaaggagaatctgcttgtgaagttctgtatgttcttcgtcggtcccatacagttcgttatggaggcggcggctattctggccgccggcttggaagattgggttgattttggagtaattcttgctctactctttctcaatgcatcggttggctttatacaggagtatcaagctggcagtatagtagatgaattaaagaaaactttagcgaattccgcgacggtaatacgtgacggccaagtagttgatatcttggcagacgaagtcgtccccggagacatacttaaattggaggacggcgttgtcatcccggccgacgggcgccttgtatccgaggaatgctttttgcaggtagatcagtctgcaatcactggagaatcccttgcagtagataaaaaaactggcgacagtacatattcatcatcaacagtcaagaggggcgaggcgtatatggttgttaccgctactggcgactcgacctttgtcggccgagctgccgcactcgtcaacaaggcaagcgcaggtcagggtcactttactgaagttctaaatggaattggaacaatattactagttctagtcattgcaactctactagtagtctgggtagcgtgcttttatcgtacgtcccccattgtcagaattttaaggtttacactggcaataaccattgtcggcgtccctgtgggacttcccgctgtagtcacgactactatggcggtcggagcatcttatttggctaaaaagcaggcgatcgttcagaagctctcagccatagaatcgttagccggggtggaaattctgtgcagtgataaaacaggcactctaactaagaataagctttctctacatgagccatacaccgtcgaaggggtagaggcagatgatctaatgttgaccgcctgcttggcggcgagtaggaagaagaagggactagacgcgatcgataaagcatttctgaagtcccttatctcttacccgcgtgctaaggcagcgttgactaaatataaagtgatagagttccaaccctttgaccctgtttccaaaaaagtcacggcatacgtagaatcacccgaaggggagagaataatttgtgttaaaggagcacctttattcgtactgaagacggtcgaggaggaccatcccattccagaagatgtgcacgacaactatgaaaataaagtggctgaatttgcctcgaggggattcagaagtcttggcgtcgctcgcaaacgtggacaaggtcattgggaaattttaggcatcatgccgtgcatggatccccctcgggatgacactgcacaaactgtgaatgaggcaacacatctaggactccgtgtcaagatgttaaccggtgacgccgtagggattgccaaggaaacgtgcagacaacttggtttgggaaccaacatttataatgccgaaaggctcggcttgggcggagccggggacatgcctggttcggagatcgctgacttcgtggagaacgccgacggatttgctgaggtattccctcaacataaatacaatgtcgttgagatactccaacaacgtggatatcttgtcgccatgactggcgacggggtaaatgacgcgccgtcattgaagaaagcagatacgggtatcgctgtcgaaggggccagtgatgcagcccgcagcgcagctgacatagtattcctcgctcccgggctttctgctattatagacgcattgaaaacatctagacagatattccacaggatgtactcatatgtcgtatatagaattgccttgagcctgcacctcgaattatttctgggtctgtggatcgcgataatgaatcggtcattgaatatcgatttggtggtctttatagcgatatttgcggacgtagccacactagccatcgcatacgacaatgctccgtacagtccgaaaccaacgaaatggaaccttccacggctgtggggcatgagtataattctgggcataatactagcaatcgggacgtggattacgttaactacaatgctattgcctaggggtggtatcatacagaactttggttcagtggacggagtactgttcctagaaataagtctcactgagaattggttgatcttcatcacacgtgcggcaggcccgttctggtcctcgtgcccaagttgggaacttgctggggcggttatcatagtggatatcatcgcaacgatgtttacgctttttggatggtggtcccagaactggaccgatatagtcacggtagtaagagtttggattttcagctttggtgtattctgtgtcatgggaggcgcttactatcttatgtctgaaagcgagggtttcgataggctaatgaatggaaaaccacgtaaggagcccccgcctcaacggtctatggaggactttatagtcgcgatgcaacgtgtaagcacgcaacacgaaaaatctgggtga

SEQ ID NO: 4059 - DNA, 6210 bp, Artificial Sequence
  Optimized genes for Pichia pastoris
atgtcggcaaccagcggggtagttaaccgccccctcgtactaaaccatggttccattgaaagtaccatattgattcctaccactgagtaccacttctatcaaacgctcttagaaggctttagaaagagtctgccccaagttacggaaggttttgctgacgacgacgaaccgtcttcgaaggcggagttgctcatgaaatttttggggtatatagtccaaagcggagtaagtaatcagcaggagcagttggctgctgcaaagctggtgctcaatgaatttgaaagccggtttctgcaagggcttaacttacattcttacgcagccatcttactcaagtccgaaacattccctacgactctgttgaagattaaagaaaacttgattaagaattactatcttgggcgcgcgcttgtttacttgccggggcaacgtggactcgtttaccctccgtctgccttactgaacgctgggaaatcaggatctgcacagatttatgctatattcgggggccaaggtaatacagatgactattttgaggagctacgtgatatatatcatatatatcagggcctcgtttctgattttgtaactaaggcgcagttgaaattgcaagagcttattcgaactacccctgagactgatagaatttatacacaggggctggacttgataaactggctcgaaaacaaagataaaacacccgatcagcaacagttgctgtccatcccaatgtcatgtcccctaatttgtgttatccagctgtgccattacattgtgacgtgtaggattctaggtataacacctggacagcttagggacagcctgaaaggtacgactgggcatagtcaagggcttgtaaccgcagtggtagtgagcagtgcggattcatgggagtcgttcgagaagttggctctacaggctgttgagtttatgttttatatcggggtgcggggtctccaaacctaccctaatacatcgttacccccgtcaatagtacaagacagcgaggagaatgccgaagggactcccagccctatgttgagtgtaagggacctaagttacgaccagcttgtgaagttcgtgaatgaaactaatcaacacctgcccgaggcgaaacatattgacattagtctgattaatggtccccggaatgttgtccttactggtcctccccaatccttgtacggtctaaacctaaatttgaggaaagctaaagccccgtcaggcttggaccaggccaggatccccttttctgagcggaagctcaggttttccaatcgtttcctaccgatcatgagtccgtttcatagtcacctgttatccccgtcgacagagaagattgtagctgatcttaagaaagccggagtcgagttttcgcagtcaagcatgaaattacccgtgtttgacacttacgacggcaaagatctgcgttcgtacagcgggagtatcgcggctcgcctcgtcgagtgcataacgaaactaagggtcaattgggagctttccacggagtttaacagcacgcacgtgcttgattttggacccggtggggcttcgggcctaggcgtccttacgcatcgtaataaggaggggaccggttccagggtaatcgtagccggagtgttagacgctgaaagtgaggacagtgagtttggatacaaacaggaaatcttcgaatccaatgagaaagccatcaagtacgcgccgaactggttaaaagagtacaaaccaaaacttgttaaaacgtcggcaggaaagatatttgtagatacgaagttttcgcgcctacttggtcgggccccattaatggtcccggggatgacccctaccacagtgtccccagattttgtggcggcgacgcttaacgctggctttcatacggagattgctggaggtgggtactttgccccatccattatgaaggctgccttgcagcgtgtcatagaccaagttacgcctggcactggagtcggtattaatttgatatatgtaaatccccgcatgttgcagtggggtatcccaatgataaaagagctcagggaacaggggtttccaattcagtcgctttcgattggcgctggggtaccgtcactggaggtcgctaccgagtacatcgaaaccctcgggttagctcacctgggactcaagcccggtagtattgatgccgtaaaccaggttataacaattgctaaagctcatccgaattttcctatagtactgcagtggaccgggggaagaggaggcggacatcactcctttgaggactttcatcagcctattttgcagatgtacagcaagataagaaagtgtaagaacatcatcctaatagctggtagtggcttcggtagtgccgaggatacgtacccatacttaacagggtcttggagccatcaattttcataccctagcatgccattcgacggtgtcttgttcggaagtagggtgatgacggcgaaagaagccaaaacgagtcccgctgcaaagcaagccatagcggactgtacgggtgtagataactcgcagtgggaaaatacgtataaaaagccgacgggcggcattatcacagttcgttcggagatgggggaacctattcacaagatcgcgacgaggggtgtaatgctttggaaggagctagacgataccattttcaccctacctaaaaataagatgcttgaagccatcgcgaaaaaaaaagattacataataaagaagctaaacgcggattatcaaaagccctggtttgctaaaaacgaaaaggggacctgtgatctagaggatatgacttataaacaaatagccgaacgactcgtggagctgatgtacgttcgtaagtcgcaacggtggatagacgttacattacgcaatttcacgggcaaatttctccgtaggattgaagaacgcttcgcaactaaggtaggcacgatatctcttatacaaaacttttcccagctagaggaaccagaaaaagcaatcgactctgtgtttaaagcgtatccggaggctgctagtcaattgattaacgaggaagattgcgactggtttttgctagaggctcaaagtccaacccagaaacctgtccctttcatacctgtgctggatgagcgtttcgaatttttttttaagaaggactccctatggcaatctgaagacctcgaggcagtcgtcggggaagacgttcaacgcacatgcatcctccacggacccgtggcggcacagttctcgaataaagtagatgaaccgataaaagacattctagaaaacattcataaaggtcacataaaaagcctagttaaggaagtttacaatggcgatgaatctaaaattccagtcgttgaatacttttccagcgtggactcatttagcgacactgcgattgaaggtgtgaaaattgaacgctcccggaatactgagacgttcacagtaacctcaggtaacgtagataaccagcaatggtttgatttgctcgcaggaaaggaacttagctggcgccgagcgttcatcactgctgcgcgactcgtgcaaggtacgaacttcgtaagcaacccggcccacagtgtgctagcgcccagcaaggacctcgtggtgaaaatcgaaaatggtagcgatgccaagaagaccgtgctcaccgccttccaacgcgttagggggaaatacgtccctgccgtatccctgaaatccatcggggatctcaagataaagctcgagctcatagagacgcgtacggcggacaagtccgcagttgcccttgagttgttttataattacaaaccaacagatggttttgctcccatcctcgaggtgatggagggtcgcaacacctcaataaaaaacttctattggaaactatggtttggctcttcagttccagtagacttggacttcgatgcaaataaaccaatatcggggggagaggcgagcgtcagttcacaagcgatagccgaattcactcacgctgtgggaaactcatgtgaggatttcgtccctagggccggccgtccccaactcgctccaatggactttgccatcgtgctgggatggaaggcgatcatgaaagctatctttccaaagactgtggacggagatatcctcaagttagtccatttgagcaatgggtacaagatgttccctggggctgatccccttaagaagggtgacgtagtatctaccgtcgcccacattagaagcgtagtcaacggcgagacgggaaaaaccgtggaggtcgtgggcgtcatttcgcgagatgggaaacctgtgctggaagtgaacagtcagtttttctaccggggaaagtatcaagatttcggcaactctttcaagaaaaccaccgagacacccgtccaggtggcgtttaaatccgctaaggacattgctgttctgaaatctaaggagtggttccatctcgagaaagatatcgacttactgaaccaaacgttgacatttcgttgcgagtcgtacgtaaaatttaaaagtagtacggtctttgcgtccgttaagacaactggccaagccttgttggagttgccatcgaaagagatcattcaggtagcagaaattaattatgaaagtgggtcgtcatacggtaacccggtattggattacctgactcggcacgggtcgacgatagagcagccaatcatgtttgaaaatgcaattcctcttgcccaaggaacggaactgaccagtaaagcgccgggcaccaatgagacatatgctgcagtttcgggagactacaatcccatacatgtcaacaaagttttcgcttcctatgccaatcttcccgggactataacgcatggtatgtactcctccgctgcggtgcgcgctttagtagagcagtgggcagcccaaaatgtagcgacccgtgtacgcgcgtttaaggccgactttgtgggcatggtcttgccgaacgatgagctcgtgacacatctcgagcatgtcgggatgatcaatggccggaagatcattaaagttgaaaccaagaaggtggagactgaagaggtagtacttatcggagaagcagagatcgaacaacccgtcagcacctttgtatttacaggtcaaggcagtcaggagcaaggaatgggaatggatctgtacaattcttccgaagtggcaaaatctgtatgggatagggcagatgtgcatttcataaacaattatggcttttcaatattggacatcgttaaaaacaaccccacggagctgacggtccactttggcggcgcgaaggggagatcaatacgcaataactatatctccatgatgtttgaaactgtagccgcagatggacagctaaagtccgaaaagatcttcaaggagattaacgaggacacgatttccttcacctttaaaagtccaacaggacttctgtcggcgacacaattcacgcagcctgctctcacgttgatggaaaaggctagctttgaggacatgaagagtaagggcctcgttccctcggaatccatgtttgcaggtcacagtctgggcgagtacagtgctttaacgtccctgggcgacgtaatgcccattgagagcctggtcgatgtggttttctatcgcggaatgactatgcaggtagcggtccctcgcgacgaacagggccgaagcaattatgggatgatcgcagtcaacccctcccgcgtcagctccacatttaatgacagcgcacttcgtttcgtcgtggagcatattgcgcagcaaactggttggctacttgagattgtgaattacaatgttgaaaacacgcaatatgtagctgccggcgacctgcgaggtttagacaccctaagtaacgtgttgaatgttttcaagatacagaaaatcgacatagtcaaattgcaagagactatttcacttgatgaggtaaaagtccatttatccgagatcgtcgacgaggtctccaaaaagagttccagcaaacctcagcccattgaccttgaacgaggttttgcatgtatacctcttaagggaatcagtgtcccgttccacagttcgtatttacgttccggcgtcaagccgttccaaacatttctatgcaagaaaattcctaagtccgcggtaaagccagcaaacctaataggcaaatacatcccgaatctgactgccaaaccgtttcaattgacaaaagaatattttgaggacgtttacgaacttactaagtcagaaaaaataaagcatattctcgatcattgggaggaatacgagtcatcgtga

SEQ ID NO: 4060 - DNA, 1755 bp, Artificial Sequence
  Optimized genes for Pichia pastoris
atgtcggacaagaaaacaagcgtagaggcggtgattacggaggttgattcctctcctgcatatgaggccggctccatcaaatcggagaataaacgtaatttcgtgcaaaactggttcgatggattcaaaccctacgaaatggaagaactagaccccaatctatcggaggtggagaaagccgcaatcgcgactgcaaacgctccactccaacgcaaactaaaaaaccgacatctccaaatgatcgcaattggggggtcgattgggacgggcctctttgtcggttcagggaaagctctagccgcagccgggcccgcggcgcttctgatagcatggggcctcaccgggataatgatttactttacagtccaggctctgggggaactctcggtcaccatgccagtttcaggatcctttgccgtgtatagcactcgttttatagatccatcatggggctgcgcgatgggtttcaactacgctatgcagtggctgattgttttgccgcttgaattggtagcagcaagcatcacactatcatattgggagggttcgaaaagtgtcaatgcagacgtttgggtattaatcttttacctccttatagtagtcataaacctgttcggtgttaaaggctatggggaggcggagttcgtgttctcactgattaaggtaatcaccgtgatagcctttatattcatgggcataattttgaattgcgggggggggcccaaaggtgaatatatagggggccggtactggaaaaatcccggggcttttaatacagaatacaacccatttaaagccgtctgcagcgtatttgttacatcagcgttctcgttcgcaggcaccgagctagttggcttggctgctgcagaagctaccaaccctagaaagagtttacccacggcaattaaacaggttttttggcggattatgctgttttatatcatttcattaacactgataggcttattagtgccttttaatgaccctagactgataggctcttccagcgtcgatgcgagtgcaagtcccttcgtaatcgcaattgttagcaatggtatacatggtttggatagtgtgatgaacgtcgtgatcatgattgcagtcctttccgtgggaaattcagctgtgtacgggtcttcacgcatcttacagagcctggccgcacaagggcaggccccgaaaatccttggctacattgaccgcgaaggtcgaccacttgcagccatcgggctaaccttattattcggttgtttagctttcgtggcggcgagtcctaagcaaggcgaaatgttcgattggctgttggcattatcggggttatcgtcaatctttacgtggggttcaatttgcttgtctcatatacgttttcgagcctgccttaaaagcttgggacgtgggactaacgaactcgtatttaccgcgcaaggcgggataataggatcctggatagggctaattataaattgtctggtattgattgtcagcttttgggttgcagcgttccctcttggggacaaaagctcggctgaggggtttttcaaggcctacctaactgtgccagtagtcattatcgtatacgttatacacaagatcgtcaagaagaactggtgtttatacgtcaagctcaatgagatggatgtggactcgggtcgccgggatttcgacctagaactattgaagcaggaaatagtggaggagaaagagacgttagcacggaaacccttctggtatcggacctataaattttggtgttga

SEQ ID NO: 4061 - DNA, 1362 bp, Artificial Sequence
  Optimized genes for Pichia pastoris
atgtcgtttgggaaccattactactttccagtgtccacgacctctttcccaaaatggattgacaggatcatgacttccaacataaacggtagtctaccccagagtgcgaacgtggtagttataggatccggattcgcagggacagccgtgtcatattacttacaaaacgaaattgcaggagaccagtctattgttatgctggaggcgcgagctgctgttagtggtgctacgtctcgtaactccggattgatcaaacctgaataccatcggaatcatggagaatatgttgataaatttggtagcaaagtggctggtcaactcgtaaattttgaggtcgacaatatgaaagagctagcccgaatcctgaccctcgactcggaccttaacgagaaagcggacttccaggaacgaattcatcttgatgcttactcaaaccccagatcaagcgagactgcaataaacgacttttacgcgttcatggagaacgaggaagtatccgtagacctcaagcggaaggtgcagatactttttggggatctcgctaagcagttgtccaacgttcccaccactccattcgtaattcactatccaaatggttccgtgaactcttatgactttgtcactgcaatgcttactagggccatacagaagggattagctctctatacaaatacattggtggaggaagtacagcagttagactctggagtgtggaaggttagcacgtcgaggggtgagctatttgcagataaggttgtgtttaccaccaatgcctacactcagggtcttctccccgagtttagcaagtcaattatacctatacgtggagtatcatcacaggttaacgtccgtaacaccggtaatgagcacagtctgagtatagggagcgacatatatgtcccacagtccaaaaatttattatattcgtccctaggcgaattggaaaaacaaacgaacttcatggcgaactacaatacagtagacgactcgaccgttagtagccaatctctggaatacctacagaagaatttaggaaaggtgaattcgttagccaccgctacagccacaagcagttcttctggtattatggcgtacacggatgaccattttccatacgttggccagctctccgagctcgggaagctaaacgcatacattctagctgggtgtaactgttctggattgagcagaatgttgctttgtgccaaagaattggcaaaaagtgttgcgttagggagcgagctctctgatagagtcccggccccatacaaggtgacccgtgaaagaatgggattggttgataagttaatgcagagtgtactgaacgaacgagagatacgagaaacccgagccaggctttaa

SEQ ID NO: 4062 - DNA, 1086 bp, Artificial Sequence
  Optimized genes for Pichia pastoris
atgccagaccagctttcgtttctgaagcgaaagactggcgttatagtaggggatgacgtaaggaacctatttctccatgctcaaaagaagggtttcgcaatacccgccataaatgttacgtccagcagcactgccgtagcggcgttagaggcagccagggataataattctccgattattctacaaacgagccaggggggggccgcttacttcgccggtaaaggagtaaagaactctaatcaggaagcttcaatcggcggagcagttgccgctgctcactatatacgatccgtggccccactttacggtattccggtcatcctacacactgatcattgcgcgaaaaagttactcccgtggttcgaagggtttctcgcagctgatgaagcctattacaaggagcatggagaacctctattctcgtcacacatgttggacctcagcgaagagagcgacgatgagaacatagccacgtgtgtgaagtacttcaaaaggatggcaaaaatgaatcaatggctcgagatggagatcggaatcactgggggtgaagaggacggtgtcaacaacgaaaacgccgacaaggagttattgtacactaaaccggaaacggtgttcgctgtccataaagcattagctcccatcagtccaaactttagtatagcagcagcattcggaaatgtgcatggtgtatataagccaggcaacgtagtcttgcgaccgtccctcctcggggaccaccaaaagtacgctaaagagcagctaaagtccgaatcggacaagccccttttccttgtgttccacggtggatcgggtagcacgcaggaggaatttgacacgggtatcaggaacggggtcgtaaaagtgaatcttgacactgattgccagtatgcatatctaataggtattcgggattatgtattaaaaaagaaagattatatcatgagccaggtcggcaaccccgagggtgatgacaagccgaacaaaaaatatttcgacccgagagtatgggttcgtgagggcgagaagacgatgtcggctcgcgttacagaggcattgaacatattccacactgccaatcagctttag

SEQ ID NO: 4063 - DNA, 1374 bp, Artificial Sequence
  Optimized genes for Pichia pastoris
atggtacaacctcaagagccggagttcgaacaagcctataatgagttgctgagcacgatccaggatagcaccttattcgagaagaaacccgagtataaaaaggtcatcgacgttgtttcaatcccagaacgtgtcgtgcagttcagggtggtctgggagaatgataagggcgaactcgaagtcaatcgggggtatagagttcagtttaacagcgctttgggcccttataaagggggtctcagattccatcccacggtaaatctctcgatcctgaaattccttggttacgaacaaatatttaaaaatgccctcacggggctaaacatcggaggagggaagggaggagccgactttaatcctaaagggaggtctgataatgagatccggcgattctgctacgcgtttatgtccgaattaagtcgacacataggtcaattcacagatgtgccggcaggagatataggtgtgggaggaagagaagtgggatttttgtttggtgcatacaaaaagatcaagaacagctgggaaggggttctgacagggaagggactaacgtggggcggcagcttaatccgccctgaggcaacaggttacggcctagtatactatgtcgagaaaatgatcgagcacgccactcaaggaaaagaaagcttcaaggggaagaaggtcgcaatttctggaagtggcaatgtggcccagtatgcggccttgaaggtcattgagctgggtggcatagttgtatccctctccgactcaaaggggtctatcatagcaccaaatggcataacaacacaacaaatctccgcgatcgcggaggccaagcttaaattcaagagtttagaggagattacagggtcttacagtgcgttcagcgacagccctgtcaagtacatccctggcgcccgtccgtgggtacacgtcggggatattgacgtggcattaccgtcagcaacgcagaatgagatttctggggaggaagcaaaggccctggttgctgcagggtgtaagtacgtcgctgaaggatcgaatatggggtccacgttggaagcgatcgacgtttttgagggcgagcgcgcatcttcttcaggcacagccgtctggtacgcgcctggcaaggcggccaactgtgggggggtagctgtaagcggccttgaaatggggcagaactcacagagagtgcaatggacggaggaggaagtagaccaaaagttaaaggacataatgatcaactgcttcgataactgcttaaatactgcaattgcgtactcgtccgaaactaataaggattccctaccgagtctcgtaaaaggggcgaacattgcgggcttcgtcaaagttgcggacgccatgtatgcacagggggatgtattctag

SEQ ID NO: 4064 - DNA, 1227 bp, Artificial Sequence
  Optimized genes for Pichia pastoris
atgactgaatctgctttcagtattagccacttacatgttataacccctaccttcatgcatgtgctaaagtataaatatccggaatattcgacgccgaagtcttcattccttctcttctttcaatcattattatatatcgagagtatggtgagcaaaaccgctcaaattctagctggtgccgccgttgtaggtaccgggttgatcttgtaccagcagaagaaacaagaaaaattgcaaacaccgatctcgtcgggccgctccggtaacaaccctgtgacggtcggatctggaattgcacctgcagtagataaccacacgcggtggtcacaaagccccgagagcaagttcataagcaccaagagcttagggggacccccagcaaaacaagatgcttacaatgacgccagatatcagtttgagcaggcccaacaaaaattcgaggatacaaaagcttcttggtggcagtgggggcaacaaaagtccgacgaagtctcgagagaatccgagaaacaatatgagatcgcaaaagcaaagttagaagacgcgactcaatccctaagggagcaaggtcaggacgcgttggacactgccgattcgcaataccagacatggaaatcccaatggcaaagcaagctgaatgatgcgaaagaaaagacggacgacttggtttcgcaggcgaaagaacaaacaaagagtttttcatcagaggccaggagtaagctcgacaagtttagacaggaattcaattcgaagaaagaggaactcagaaaaaagtatgcgcacttgtctgaagaggaactcgacggaaaagcttttgaaagcttacgagggtggggagaatcggccgaggcttttgcacgtgaggagtatctcgaatcgaagagaaatgctgcagaaaccaggtccactcttcagcgtggctatgacttgtcgcaacagaagctgaaagaggcccaagatgagttcaaccgcactaagaaggcctggttttcatgggggaaagaccaaaatgaagaggctcacaacctggctagccgaaagctagcggaggcacagaaaagttttgatgacgcctcaaagcaattagaccaattcactagttccgttgctaagtctgccaaggacaacagtgactttgttgttcaaaagactaaagaggggctagacgtggccaacgacaaggcccaggatggtctttcgtctgtgagcaactggatacggaaatag

SEQ ID NO: 4065 - DNA, 1131 bp, Artificial Sequence
  Optimized genes for Pichia pastoris
atgtacatacccccaacttcgtttaatcgtaagcaattcaagtattctggtgacaactacaacactccctctgagtttaaggagcaggcgcgcctagacatccatcgtaaattagctcaggctcagtctaacttacgccacgggtccagcccacttgccacaaaatcgataaccgcttcctcaagtcagttctcaggctcggacgtagaaagccttgcttcggtggcctccgatggcagtgaaatgaccatcgatgaatcaaaacggaagaggaaggcctacttgggttttctcaagaaacctgagtccaagctttccagaacaactacgaggaggtcgtcactattttcaaacaaccttactcagcagccgaccaaccagaccgaggccacttccttattcaccaactatttcagtgataatggttttgttaccgaggtagatcttaatgaagtccttccaaagaattttgacgacatgtatgacccggatctgaccgttgaaaggttctataacggccggccggtttttaccaagcgcaatctagtcaactgggagttaaatgatctccgttctttgcttatagtgtcagaattgaagccagaatggggcggatacataccgaggattcgtgacaacccggacttccacatcgtcctactgcctcttacgtctagcgataatgaatttatcgagattcttatgcgatcggatatctacaaggagagcaaatttagtaaagagtttaagatgaagacggcggcctatatagttcaatcggcgcgatatcgacataacttggcaatacaagcccggtattcagacatgcctacgaaagacccgacattgcagtacttctcgaaggtcgaatggcgcaatattattgaaaactacttactcaatctgggggtagagacgcagtgtaggctcgactttcagcaccggtgctctatacttaaaggacatccagctcaaaaaaacgacctactgtccaaggcgatactaaacaatactcagaaacaatttaacggtaacggactcagtaaagaggaaaaagcccgtatttggtcacaagcacaatcagagatatacaagcgccttggcctcgactggaccccggataaaatttga

SEQ ID NO: 4066 - DNA, 573 bp, Artificial Sequence
  Optimized genes for Pichia pastoris
atgtgggtactcaactggtttcaagacgtcttggctagcctcggtttgtggaataagcatgctaaattattgttcttaggtttggataatgcagggaagaccacgttattacacatgctgaaaaatgacagactggcgaccttgcagcctacctggcacccaacatccgaggagctgagcataggcaacgtcaggtttacgacgttcgatttgggtggtcatgagcaagcacgacgcgtttggaaggattattttccagaagtagacggcatagtctatctagtagacatcgctgacccggaaagattcgaagagtcacgggtcgagttagacgcgctacttaaaatagaagagctttctaaggtgcctgtgctcgttcttggaaataaaattgacaagtctaccgccgtaagcgaaaacgaactacgacatgcgctggggctaatgaccacaactggcaaggataaggtccagctggttgaaggacaacgacccttggaagtttttacatgttctatttacctgaggcaaggctatggtgaggggatcagatggctcagtcagtacatctga

SEQ ID NO: 4067 - DNA, 654 bp, Artificial Sequence
  Optimized genes for Pichia pastoris
atgagcaaaatttccactactcaagtacgagagcacgtcaaggagcttctaacgttctcaaacgagacgaaaaagaggaatttcctcgaaaccgttgagttgcaagtcggcctgaaaaactacgacccgcaaagggataagaggttctcggggtccctccgactccctcaggtcccaaggcctaacatgaacctatgtatattcggggatgcgtttgacgtggatagggccaagtctctagggatcgacgctatgtcagttgatgacctgaagaaacttaacaagaacaagaaactaattaagaaattagccaagaagtacaatagctttattgcgtccgacgtactaatcaaacaggtacctagacttttagggccgcagctttcgaaagcgggcaagttcccgaccccggtttctcataatgatgacctgtatagtaaagtaaccgacgtgaagtcaacgattaagttccagttgaaaaaggttctatgcctggcggtagcggtcggtaatgttgaaatggaggaggacgtcttagttaatcaaataatgatggccgtgaattttctggtgtcgctacttaagaaaaactggcaaaatgtggggagtcttgttatcaagagtagcatgggtccttcttatcggctctattag

SEQ ID NO: 4068 - DNA, 1281 bp, Artificial Sequence
  Optimized genes for Pichia pastoris
atgttagcaagtggaaagcgctttttctcctcctcaagcctacgccaagtcagtgcatgggccaaagtcgagaaggcgccagctgacaaaatactagggttgacagtactgtataaccaggacactaacccatcaaagattaatctcggggttggggcttatagagacgaaaatggcaagccttggatcttgccatctgtccgcaaagcggaggaggtattaataaaaactgaggtaaacaaggagtatgttcctataacaggctcaccaaagttcaatgagctaatcaaacagacgctgtacggtaacgaccctgctggaaagcagcttctagaacagaaccgcatagtatcctcccagtcaataagtggtactggagcattgaaggtcctttcagaatttattaagtatttccatgaaggtcctaaggacgtgctagtccctaatcctacgtgggctaatcacattgcgattttggaaaggtcgggtctcacaacttccaaatatcggtattatgatttcaacaccaatcagttagacaagaaaggcttactggaagatctagaaaatgcggcggagggccaacccgttctattacacgcgtgttgtcataatccaaccggtgtggatcctacacttgaagaatttgatgagataatcgacgttttgtccaggaaaaaacttctacctgtggtggatatggcttatcaggggtttcgctcgggaaatccgattgatgatttaagcctgctatttaggtttaataaagcagtagtagacggtcgactggataatttcgtgcttagtcagagctttgctaaaaacatgggcctgtacggtgaacgagtcggcagcctttccttaattacgagtgatgctgatgagagtgtccgagtaaagtcccaacttgagaaggtaatccgacccatttattcttcaccaccctcacacggttcgaaactagttgaaatagttctgagcgatgaagccatttatcagcagtggctaaaagacgtcaaggtcatgtcagaccgactggtgtcaatgcgaaagcttttgtatgacactctaaaaaacaagtataacaaccctctcgactggtcgcatcttctccagcaaaaggggatgttttgctatacgggactcaacccggagcaagttgccaaacttattgagcggagcgtatacctaacgagcgacggtcgtataagcatcgcgggcatatacgagcagaacgtcgattatctggctaatgccattcacgaagtcaccaccaattga

SEQ ID NO: 4069 - DNA, 732 bp, Artificial Sequence
  Optimized genes for Pichia pastoris
atgtcccttccatccgcgacagcaaacgccgccgtgacgaaccaactgctggagctaccagacaccaatttagtcgcaccagccgtcacggaggtgtcggaaaaggctgctcaatggccggcaaatgtacgtcttcaacgacaaaaaaaaatattgtaccaacggcttaaagtgcccccagccatagcgcaatttacgaacaccctagaccgaaacacggccgctcaaacttttaagctattcaacaaatataggcccgaaacttatgaacaaaagcaagaacgactgacgagagaggcagccgctattgcggacggtaagaagaaggaagatgtgtcttctaaaccctacgtagtaaagtttgggctaaatcacgttgttgccttaattgagaataagaagccaaagctggtccttatcgcacatgacgtcgacccaatagaactggttgttttcttgcccgcgctgtgccggaaaatgggtgtaccttacgccatagtcaaggggaaagcacgcctgggtaccttgatacaccggtctacagccacggttgcagctcttgttgacgtaaagccggaagacgaggcagagcttgctcagctagtcagtgccattaacaagaactttacggagaagtatgaggagagccgtaaaaagtggggcggcgggatattgtccgctgaatcccaagccaaggccgccgcgaaggccaaaatactcgaggaaaaatga

SEQ ID NO: 4070 - DNA, 1044 bp, Artificial Sequence
  Optimized genes for Pichia pastoris
atgagcgaagaagaacagcaacagaccaatgagaaggtaatagacttggagaagcgaatgtttgtgggaaatattgactatgatactacggaggaggaactgagagaattgattactggatttgacatagaaggtatagaaattccaaaacgtttttccagaagagtaggcaaactgaccggtagagggtttgcgtttgttacctttgcctccagcgaggagacagctaaagctataacggagttcgaaggcaaaaatttaaaggggcgtgacatatactgcaaatccgcaaaactaaaatctacggaggaaaaaacaaaaaaaaagaaagctaataagaaaaaaacttctgcggctaagaataatgacgggacaaccgaaggtgtaaccaatactgcagtcgacggtactgaagagtcccaagcagacgtgagttctaatgcagacagtgctagtgacagtgttgccgactctaaagacaaagagaactctgcgccaaacggtgggaaaaagaaaaagccttactctaagaaaaaacaaaatccacacaaagtaccactcgaacagggcactcctagcgagacatccatatttataaggaatttgcatcaggaggtcgtaacgagtgaacttactgagttcctcagtgagtacgatccccagtgggtcagtattcccagaagaaacatccctcggcacgtcgttcagaaattacgcaaggagaatataccgatacgaagtcggggaatggctttcgttaggttcgcggatcatgagacgcaacaaagagctctgaaggagctgaacggaaaggaaatcaaaggcaagccgattagtattgatatcgctatcgacagttttgttaaggaagagccaaaagagtcgtccgttaaggacggcgctgacgtaagcatcgtgaccgacggtgctcagcctcaagacgaaggggaggagggaaaagtggaggaggaggtgaagagcgaaccgctaaaacctttggagagtaccactattgcgcctgaagttcagactacaactgtctaa

SEQ ID NO: 4071 - DNA, 1680 bp, Artificial Sequence
  Optimized genes for Pichia pastoris
atgcaattaaggcactctgtggggttggcgatactatccgctatcgctgtacagggcctcctcataccaaatatagaaagtttacctagccagttcggggccaacggggacagtgagcaaggagtccttgcgcatcacgggaagcatccaaaggtggatatggctcatcacggtaaacatcctaagattgcaaaggactcgaagggtcatccaaagctctgtccggaagcattgaagaagatgaaggaagggcatccttctgctcccgtaattacgacacattccgctagtaaaaacctgattccttattcttacataatagtgttcaaaaagggggtaaccagtgaagacattgacttccatcgcgatttgatctccacgctccatgaggaatcagtgtcgaaactacgcgaatctgacccgaatcattcattcttcgtttccaacgaaaatggtgaaactggctacaccggggatttttcggtgggggacctcctgaagggctacacaggctactttactgatgataccttagagcttataagtaaacaccccgctgtcgccttcatcgaaagggattcccgtgtcttcgcaactgatttcgaaactcaaaacggtgctccttggggactagcacgtgtctcacatcgcaagcctctgagcctcggttcctttaataagtatctttacgacggggcaggcggggaaggtgtcacgtcgtacgttatagataccgggatccatgtaacgcataaagaattccaagggcgagctagttgggggaagaccattccggccggcgatgtggatgacgatggcaatggtcacggaacacactgcgctgggacgatcgcgtcggagtcgtacggggtagcgaaaaaagcgaacgtagtcgctatcaaagtgctacgtagcaacgggtcgggctccatgagcgatgtgttgaagggggttgagtatgcaacgcagagccacctcgatgcggtcaagaagggtaataaaaagtttaaaggatcgactgcaaacatgagcctgggcgggggtaagtctccggccctcgacctagcggtaaacgctgcagtgaagaacggcatacattttgctgtcgccgcaggaaacgaaaatcaggacgcctgtaacacaagccccgctgccgctgagaacgctatcacagtgggagcctccacactctctgatgcgcgagcttatttctctaactacggcaaatgtgtagatatctttgctcctggactaaatatcttaagcacatacactgggagcgacgacgccactgcgacattgtcaggaacttccatggctagcccgcatatagcgggcttgctaacttactttctcagtctgcaacccgctgcgggaagtttatactccaacggtgggtctgaaggggtgaccccagcacagttaaagaaaaatctcttgaagtacgcttcagtaggggtacttgaggatgtgcccgaggacacgcctaatcttttggtttataatggtgggggccagaatttatctagcttctgggggaaagagaccgaggataacgttgcctcttcggacgacaccggagagtttcactcttttgtaaataagttggaatctgcagtagagaatttggctcaagaattcgcccattctgtcaaggaattagcctccgaacttatataa

SEQ ID NO: 4072 - DNA, 825 bp, Artificial Sequence
  Optimized genes for Pichia pastoris
atgtcgtccgaatcgcgcacttacagtttcaagatttttagtatattaacatacgccctctcgatctatggcgaagtcagatatttcttgtttcgtacgcatcactctaggagttaccttacacccttcactggtaacagcacgctcgactatatctatgtcatcgcaactctattgttacaactcctattcgtggttcaatatttctcacaagatgggactgtttctgcaagggagcagaaaaatgttttggaacaggttgggtaccatttcagtatatataatgttttgaattttatttgggtctatttgtttaaacacaaacggtttctgttcgcagaaatagtactgttcgttaatctgtttaatctcctctcactctacttcatacataaaacgtatgcgatcaaggatctgggcagatggttcaccatccacctcagtactgttgctcttccgctatcatggattcaatatgctatcttttggaatggggccgcattgtttcactcccactacgtaagtttattgcctcgcttacttgcgaacctgctaatctgggaattccttttagtccctgcctttttcattgtcgtgtttgcagactacggagtagggttctcgtcctcctatctcacgttgtcaatagcagtaggccaactgcttacgaaggtgatcggtcttcaatggatattcggttttgtgatcgcaggtaccatatttctcctcagtctgttagtgagtacgggtgttctcgcggggaaagtcgcgaataataacaatgtactagggtccgatcgtgagcaggcgcccctacttacatag

SEQ ID NO: 4073 - DNA, 249 bp, Artificial Sequence
  Optimized genes for Pichia pastoris
atggtactcgtacaagacctgctgaatcccaatccagtgtcggaagccaagcaacacaagcttaagacactagtgcaggcacctcgatcttttttcatggacgtcaaatgtccgggttgtttcgaaataaccacagtattctcccatgcgcagacggcagttacctgtgacagctgcaccacagtgctgtgcactcctactggtggaaaagcgagattatctgaaggctgcgccttcaggcgcaaatag

SEQ ID NO: 4074 - DNA, 363 bp, Artificial Sequence
  Optimized genes for Pichia pastoris
atggcaggactcaatgccaaggaactgagggctaagagtgaacaagagcttgaagccgagttgatagagcagaagaaaaagttagcacaactgaaagtgcaaaagctcacaaaggccagtgtcccggaaattaaggcggtaaggaaagacatagcccgtgtgctgactgtgattaatctgcagaaacgagatgcggttcgggagtcgtatgccgggaaagagcacattcccaaacaacttcgggagaaaaagacaagagcactgcggagagctctcactgctgaagaaaaatcacacgaaactgttaggcaaaggaatcgcagagtggccttcccacgccgcctctatgcagtgaaagcctga

SEQ ID NO: 4075 - DNA, 1059 bp, Artificial Sequence
  Optimized genes for Pichia pastoris
atggatatagacctagacattcaaatgaaggacgcggtggaacctgatctggaggaccagcagtcgtcatcaagctcggaatcctttgattttccaataaacaacgtaaactacagctccaagccggtagaactcacatcctcaaatatcaatcaattagatagttggatcgagcaattaactgactgcaaacccttgagtgaagagagcgtaaagaaattatgtagcatggctattgacgtactcaagtttgaagaaaacgtacagcccgtgaatgtacccgttacaatttgcggagacgtccatggccaatttcacgatttaatggaactctttaagatcggtgggccctgccctgatactaactacctcttcatgggtgactatgttgatcgtggttattactcagttgagactgtatcttacctggtagcgatgaagatccggtatcctaaacgtattaccatcctccgcggcaaccacgagtcgcgacagatcactcaagtctatggcttctatgacgagtgctttcgaaagtacggatcggctaccgtctggaaactatttactgacttattcgattattttcctattactgcgctggttgataataagatcttttgcttgcatggaggcctcagcccgatgatcgaaacaattgatcaggtccgagaactgaaacgtgttcaggaagtacctcatgagggtcctatgtgtgacctgctttggtccgatcccgacgatcgaggagggtggggtattagccctcgaggagcaggttttacgtttggccaagatataagtgagcaatttaaccacacgaatgaccttgatctcatcgcacgagcccatcaattagtaatggaaggctattcatggagtcatcaggacttagtcgtcactatattttctgcccctaactattgctaccgatgcgggaaccaagcagcaatcatggaagtcgatgaaaggcataaccgtgagtttctccagtatgacccatcaatcaggcctggcgagccgaccgtgacccgtaagacgcctgactactttctttga

SEQ ID NO: 4076 - DNA, 255 bp, Artificial Sequence
  Optimized genes for Pichia pastoris
atgtttcagcgaacgaccgcgacgctcgtccgccagaataaggcaattgctcgcttttatagtgagggttctaccggggctccccgcagtgacggctccggtgatgccttcacaaaaagagaaaaagcacaagaggacttctacattaagaaacatcaagctgagcaattggctaaattgcgtgaacaattaaaaaatcagaaagagcatttacaaaacctagaaaaggagatcaataatataaaagagaagtaa

SEQ ID NO: 4077 - DNA, 1062 bp, Artificial Sequence
  Optimized genes for Pichia pastoris
atgtctacatttgatttcctaagccgcaaaagtggtgttatagtaggcgatgacgtgcgcaagttgtttgaatacgctagagagcgtaagtttgcaattccttcaattaacgtaacatcatcgtccacggccgtagcggttcttgaggccgctagggataataaatctcctggcaagggtgtcaataacaaggatctcagcgcttcagtaactggttcgatcgccgcggctttattaattcggactatcgcaccttcctatgggatccctgttatcctacacacggaccattgtcagaaaaaatggttgccctggttcgatggaatgctggatgcagacgaagaatactttaaaacgcatggggaaccgctatttagttcgcatatgctagacttaagcgaggaaacagatgatgagaatatcgcgatatgtgtcaaatatttcaagcggatgacgaagatgaaccaatggctagagatggagatcgggatcacggggggtgaggaagatggcgtcaacaacgaaaacgcagataaagactccctgtatacgtcccctgaaacggtctttgctgttcacaaagctcttgccccaatctcacccaattttgcgattgcagctgcctttggcaacgttcacggcgtttataaacctggaaatgtagagttgaggcctagcattctgggcgagcatcaagcatacgcagcgcagcagttgggattaaagaatggatctaagcctctgttcttagtatttcatggcgggagtggatcatcccaacaagagttcaatacggctatcaaccatggggtagtcaaggttaacttggacaccgattgccaatatgcatatacaattgggagcagagactacatcctcaagaacaaagactacctacagagcatggtgggaaatccacaaggcgcagacaagccgaataagaaatatttcgatccgcgtgtatggatacgtgagtcagaaaaaactatgtctggcagagtcaaggaagcacttgaagtatttcacgcggcagggacgtttaagtcagagtccaaattatga

SEQ ID NO: 4078 - DNA, 777 bp, Artificial Sequence
  Optimized genes for Pichia pastoris
atgagcacacaccaagacatcgaatcctccgccgaaactgctcataatccgcacgatgagatacacaaaggcgaatttgtcactactcaacaggactacttggccccgttcaccgggggtcttatatcgggatatcaggtccggccatctagaaagttcgccaaccccgtaccggcgggcgtattcagtctaggaacctctctttttactctcggtctaattttagcgggaactcgtaacgtttcatcccctgctgtgctaaccggcagttttctgttttctagtgggctcatacagatcatttgcggcatctggtctatagtgttggaaaacgtttttggaagcgttttgctcctatgttacggagggttttttgcatcatttggcgcaatccaaaatggtatgggtgtagatgcgtatacagatgctgatgaattaacgaacgccctaggtttatatgtcgcagcgtggaccgtatttgcgattgttttgtggactgctactttcaaatcaacattgccgctttttcttctgacattttttacggctatgttttttctcttatacgacatcgctatatttgggaaccacacgggttgcgagacggcgagtggggtcttttgctttttagctgcgatgtgcgctttttatgctggttatgtcggcatgactaagaatcagcgaaatagttacatcccagtaccaaagacgaagtggttacttatgccctccagtgccaggtcaccggactataatcaagctggcttttatgtatag

SEQ ID NO: 4079 - DNA, 534 bp, Artificial Sequence
  Optimized genes for Pichia pastoris
atgggtcgtaggaagtcccaggcggcggcagagcggaaccttgagcccataaagatctccacggacagcatcaaaaaaaggccgcgccgggacagcaacgaacccccattcaaaaagtttgacgatctagagatgttcgagacgtaccttaaaggtgagtcgtgggacaacgattttgactttctccatgcccgattagactactatcccccatttatccggaacgaaatacacgatgaccctgaaaagatcaagcctacaatgaacaacaaatccaaaaagtttgtgcgaaatttacatcaccatgtagacaagcatttactcaaacagataaatgatatggttggtatcgaatacaagttcaaacgggaagaggaaaaacttcctgatggaagactgatatggaggtacaaggacgaatcagaccatggttttgagggtttggacagaaagtggactgtggaggttgacgttgagtgttcgccaaatgatccgacggtggtagtggacatgcgctccataccgattgactaa

SEQ ID NO: 4080 - DNA, 837 bp, Artificial Sequence
  Optimized genes for Pichia pastoris
atgactgatcgcgccacacagaacagcataaacacgaatcagaattccaattctagcttcaaccaggatgttgagaagggagacgttgaggcgcagggcgcgcccgcccagcctacgttcacgaatagtacgttcagacatgatgatcaaaacatatacatcaatgacacggctatacccaaggaggagtttatgtatgctttcggaggaacgcttaccacaggacggcaatcagtccacagatcttttggcaaccccgtacctgccggactggcagggttctctttagggactttcgcgttaggccttatcctcctacaggcgcggggcgtaactgacgtctcgatactcattggaatgtttttgttcgtcagtggcgttgtcgaaataatcgctggcatttggtgcatcgtagttgaaaatacgtgggcttctgtcgtattcttgggctacgggagcttttggcttggctatgcagcgattgttacaccggccttcggcgtcgcggctgcttatgaaacagcagaggactttaacaatgctgtcgggatgtacctttgtccctgggctgtattctcattcatcctgtggtcttgcacctggaagtccacgtggccattaacagctctggtgttttgtattttcatgatttttttagtgcttacaattggttacttcgttagtagtgtcccaacaatcaaggcggggggtgtcttttgctttgttggtagccttctgggattttataatatgtacgctggattagctaacccaaccaattcctatgtcgtggtgcatccgcttttcatgccaaatgctgccaagcctgcgagctga

SEQ ID NO: 4081 - DNA, 1197 bp, Artificial Sequence
  Optimized genes for Pichia pastoris
atgagtgtgcgtaatgcgacgtttaggctttctcgagcagcgattgctaaaagaacactagttcgaatagcttcacaagcatcactgcgccctactacgcttaatagcgctactggcgttgcccgctcacagttaactttctcaagaggagtgaaaactattaactttggaggtgttgaagaagtagttcacgaacgctctgactggcctcgagagaaactgctggaatatttcaagaacgacacattggcacttataggctatgggtcacaaggttacggccagggcctcaatcttcgtgacaacggtctaaatgtcataattggtgtccgcaaaaacggggccagctggaaggcggcgatcgaggatggatgggtgcccggagagaatcttttcgacgtcacggaggcaatcaaaaagggttcgataataatgaatttgctttctgatgccgcacaatctgagacatggtctacagtaaagccccttctcactgagggtaaaacattatatttctcccatggttttagtcctgtattcagcaatttgactcatgtggaacccccttccaacatcgatgtaatactggcggcacccaaggggtcgggccggaccgtgcgctccctctttaaagaaggccggggaatcaacagctcatatgctgtttggaatgacgtaacaggtaaagctgaggagaaggctatcgcacttgctgtggccgttggaagtggatacgtctaccaaacgacatttgaacgggaggtgaatagtgatctatacggggaaagaggttgcctcatgggagggatccatggaatgttcctcgctcaatatgaggtgctccgtgaaaatggtcatactccgtcagaggcctttaacgaaactgtcgaagaagctactcagtctctataccccttggtagggaaatacggcatggattacatgtatgacgcatgtagtactacagctcgccgtggtgcgcttgattggtaccccattttcaaggatgcactgaagcccgtttttgaagatttgtataactcggtgaaaacgggtaaggagacgcagcggtccctcgattttaacagtcagccagattaccgggagaaattggaaaaggagttggaaatcatcagaaacatggagatatggaaggttggcaaagaggtgcgaaagttgcgccccgaaaataattga

SEQ ID NO: 4082 - DNA, 681 bp, Artificial Sequence
  Optimized genes for Pichia pastoris
atgtcgatcccaaaacccgaaggctcgactcttagattgggctcaacggcaccggacttcaaggctgaaacatcgagaggtccaattagcttccatgacttcattggagatagttgggtagtgttgtttagccacccagacgatttcactccggtctgtacgacagaattaggggccttcgcgaaactgcaaccagagttcgagaagcggggtgtaaaattaatcggccttagtgccaacaccacagactcccatcaagcctggataaaggacattgacgaggtcacgggtagccatttgacgttccctatcatcgcagaccccgagagaaaaattgcactagcctatgacatgattgacttccaggatgcctcgaatgtagacgataagggggtgcaattcacgataagatcagttttcataatagatccgaagaaaaaagtacggctcatcttgagctatccagcttcaactggccgaaacaccgccgaggtgcttagggtcatcgactctcttcagacaggcgatcgcaatcgcgttactacgccgatcaactgggtgcctggcgacgacgtcattgttcatccttcggttaccaacgaggaagctaaatcgttgtttccgcagtttagagtcattaaaccttacctccgattgacgccgttagatccatctaaatga

SEQ ID NO: 4083 - DNA, 678 bp, Artificial Sequence
  Optimized genes for Pichia pastoris
atgggagatacactaaaagaacccattatttttgctccaaagacatatcaatacgacaagttccagttgaacccagaagatatggccgaggaccctattgaacaattcacaaaatggttccaagaagcccaggaggcgcgggaagatctcccggaagccgtgaatctagctacggctcgactaccgtcgggcagagtaagtagtcgggtcgtcttatttaaagagttggacgaccgaggttttgtaatttacagtaattgggaacagagcaaaaaagggcaagatgtgaagagtaacaaatacgctgctattacttttttctggaaggggctgcagaggcaagtgagagtggaaggggtcttcgaagcggtaagcagatcgactgtgcaacgctacttcgatactcggccgcgaggatctcgactcggcgcttgggcgtcgccccagtcggtggagataccatctcgggcggcattagaatctaacttggaggcgattgaatcgcagtttcgcgactccgtttctgtccccgtacccgaccactgggggggccagcgtctggttccgcttgaaatagagttctggcagggtagaccgagccgtctgcacgacaggctcgtgtaccgtagggagaacctggaagacaacaagtggagcatagtaagaatagcgccataa

SEQ ID NO: 4084 - DNA, 1410 bp, Artificial Sequence
  Optimized genes for Pichia pastoris
atgtccgcgatcagatcgattgcccagcgtacactcaggacacaggcccaaatatcgcgagtttcgtttttaggagcgcgggcatatagtactaaggaacctactctgaaggagaggtttgctgagttactacctgagaaaattgagcaaatcaaacaactaaaggcagagcatggtaagaccgtcatcggtgaagtgcttctcgagcaggcctacggcggaatgagaggcataaaaggtctggtttgggaaggatcagtcctcgaccctattgaagggatacgatttcgaggacgtaccattcccgacatacaaaaagaattaccgaaagcaccgggggggaacgagcctctgcctgaggcactcttttggctcctcttgacgggtgaagtccccactgagagtcaaacaaaagctttcagtgaagagcttgctgctaggtccgcccttcccaaacacgtcgaggaattgatagacagatctcccgctacgttacacccaatggcccaattctctatcgccgtcactgcactcgagtccgaaagtcaatttgcaaaagcttatgcaaagggggtcaataagaaggagtattgggtctacacgtacgaggattcaatcgatctcattgcaaaactgccaaatattgcggcgagaatctacaaaaacgtcttcaaggacggtaaagtgggcagcgttgacccgtcaaaagattattcagccaatttagcctcgctgctcggattcggggaaaatgccgagttcgtggagctgatgcgcctgtatctctctatccatagcgaccatgagggggggaatgtgagcgcccatacgacacacctggtcggtagtgcgctaagttccccttttctcagttttgctgctggcctgaacggactggccggccctcttcatggcagggctaatcaggaagtactagaatggttgtttcagattaagaaagagctcggtggagatttttccaaggagaaaattgagaaatacctgtgggacaccttgaaggcagggcgagtggtacctggatacgggcatgctgtccttcgcaagaccgatcccagatacacagctcaaagagagttcgctcttaaacacctgccggactttgatttattcaaactagtgtcagcggtctacgaggttgcaccagttgtactcacagaacacgggaagaccaagaatccatggccaaacgtggacagccatagtggcgtgctcttacagtattacggtctaacagaagaaagcttctatacggtgctctttggagtgtctagagcactaggggttcttccacaactaatcattgatagaggggtaggcgcgccaattgagagacctaaatccttctcaaccgagaagtacatagaactcgtgaagggcctaggaaaatga

SEQ ID NO: 4085 - DNA, 1020 bp, Artificial Sequence
  Optimized genes for Pichia pastoris
atgtcaacgaggccacaagtgaccgtcatttccgtcgagggaaagccgtcgtcaacatctctgccgcttccggccgtattcaaagcaccgataagaggggatatcgtgcaaagtgtatttacacgcattaacaaaaacaagcgccaggcgtacgcagtgtccgagaaggcgggccatcagacaagtgccgagtcttggggaacaggtcgtgccgttgcgcgcattccgagggtgggtggaggcggtactcatcggtccggacagggggcgtttggtaatatgtgtcgaggcggacgcatgttcgctcctacaaagatctggaggaagtggcatgtccgagtaaaccttaacgagaaaaggtacgccacggcgagcgccatcgccgcaacatcagtccaatccctggtcctagcacgcggccatcgaattgagcagattgcggaaattccgctagtggtgtcaaacgacctagaagcaatacaaaaaacaaaagatgccatagcagcgttaaaggctttgggtgctagtgatgatttgattagagtgattaaatctaagaagctccgagcaggaaaggggaagtacaggaataggcggttcacccagcgccgaggccctttgatagtttttaacgaggataagggacttgtcaaggcacttcgcaacattccgggggtcgagacttgtaacgtcagaacattgggtctcttacaattggctcctggagcgcatcttgggaggttcgtgatctggactgagagtgcgtttgcggcattggattccgtctatggctctgaaacaacagagtcagtgaagtccaattatagcctgcctaagaacataatcaccaacactgatatatcgtccgtcataaactcagctgaggttcaggccgcgataaggcccagtctcgcgggaaagccaacgcatttgcatgtgaaaaaagtgaacccacttaaaaatcatgaagttatgcttaaactcaacccttatgccaaagtcctcgcagagaaaaaatga

SEQ ID NO: 4086 - DNA, 1743 bp, Artificial Sequence
  Optimized genes for Pichia pastoris
atggctttcggcgataaactcacccaccggttccataagagttccgatgcctctaccggtgcagcgtcagtcgaagagtactccacaagtattcacgagaaatccgacaaatctgccatagggaaatttcttgataaaattgctgttcaagaagagaaaggtctctcagtatcccagacgtttttatttaactttgacctcagacccgtcgaatcagctcgccgggtatggtcctggtttaattacgtattcttctggatagcagacagttttaacatcaatacctggcagatcgctgccaccggagtccaagcagggatgtcctggtggacgtgctggcttagcgtgtgggtgggctattttctctgtgggattttcgtcacgataagtgccagagtcggcatttattaccatgtttcgtttccggtgtcgtgccgttcctctttcggtgtctttggaagtatatggcccgtctttaaccgcgtagtgatgagctgcgtatggtatggtgtgcaggggtatattggggggacgaccatggctctaatgctacgctctatattcggtaacgacctaaatacaagaatccccgacggaatatcgtcccctaatgttacgacattcgaatttttgagcttcttccttttctggctttttagcttgccctttatatggttagaaccgcataaggttagacacctattcaccgtgaaatcctacgttgtaccggccaacggaatcggcccaattgttaaacaaccttctacaatccacggttcagaatttgcttgggaatttatccgcatggtcatgaattcgttggcgaatttcgcgactctcataacaaatgcgcctgattttagccggttttccaaaactaagaaatccgcgaaatgggcgcagctctttagtatccctttatgcttctccattacttcactcattggcatcctggtatcttccgcttcgaccgtgatttatggcgaaacatattggtcaccaattgatgttcttggtcggtttttagataactataactcagggaaccgggcaggtgtcttctttatttctctcgcgtttgcgctggcgcagttgggcaccaacatctccgccaatagcttgtcggccggtacggacgctacggctctttttccaaagtacataacaataagacgtggaggatacatatgcgctgcggtaggtttagctatctgcccctgggagcttctctcttcgagtaacaagttcaccacctacctctcagcttactctgtatttctcagcgcaatattcggcgtcatattcgccgactattacattgttaaaagaggctggctcatacttacagatctatacaatgccgagaaaacatcagcatatacttactggcacggcataaattaccgagcatttgtagcgtacatttgtggcattctgccgaatatagtaggctttgtcggagcgactggggccgggagtgtgccgcaaggggctatgtatgtttatgatttcaacttctttactggatttgcatctagcatcgtagtttatgtgttactatgctatatacatcctatacccggcctgccaactgacataaagaaggacctgttcaagaaaggttggtacgagatttacgcggaggtggaggaattcgacgtctcaggtggtgtgattaatggtgaaggacaagaacctgaggaagaggcaattgattactatagtgaggaaaaaaaagtttaa

SEQ ID NO: 4087 - DNA, 2712 bp, Artificial Sequence
  Optimized genes for Pichia pastoris
atggaagagacacaatttaccgatcgtgcccttgcgataatcactaatgcgacaaagctcgcgaaagacaattcacacccccaggtgcagcccatacatcttcttgcggcgatggcaccaactgacgaggacaccacgccttaccttaaggtgcttgtcgaaaagggtagattcgactggcagacgttcgaacgcaacatcaatagagctttaatccgtgttccgtcacaaactcccgcccctactgatgtctctttttctggggtcgccgcccatgtcattcaagaggcggggaagatgcggcagcaacagaaagatagttacatcggtcaggaccatttacttctggcattgctggaagataaatctataactcagatactaaaggattcctctatctcacctgacgcattaaaaacccagattattaacctacgcggaaaccagcgaatcgacagccggcaagcggattcctcgagtaatcatgaattcttggacaaatacgcaattgatttaacggagcaggcgcgagaggggaagatagatcctgtgattggacgtgaagaggaaattaggcgaactattcgggtactagcccgtcgaacgaagtccaacccctgcctcatcggcgaccctggagttgggaagacatccattgttgaggcggtggcacaacggataatagacaatgacgtgccaaacatcttacagaactccaaactatacgcacttgatctgggtgccctcaaagcaggagctaaatatcaaggggaattcgaggaacggataaagggggtgttaaacgagatagccgagtctaagcaaatgattatactcttcatcgacgaaattcacatgctgatgggggatgggaaaagcgatgctgcaaatcttcttaaaccaatgttagcccgaggtagtcttcactgtataggggcaacaacagtgattgagtacaggaaatatgtcgaaactgacggagcgttcgagagacgatttcagcgcattgacgttagggagcctactatacgcgagactgtggcgatattacgaggactacagcccaaatacgagatccaccacggagtgcggatactggattccgcactagtaactgcagcacaacttgcttcccgttatcttacttaccgaaagttacctgattcggccgtagacttaattgacgagagctctgcgtcagtggctgtggcaagggatagtaaaccggaggagctagatacaaaagaacgtgagctacagctcctcgaagtggaaatgaaagctctagagagggatgccgacagtgataagacaacagaggaaagattaacggcggtaaaacaaaaagttcaggagttggaagaagagcttgttccgctccgcgccaaatacgaacaagagagggcggggcatgaagagctgacagcggcaaaaaagaagctagacgaattagagataaaggcgacagacgcagaaaggagacacgataatgctacagcggccgacctgcgctatttcgcaatacctgatgtgaagaggcgtatcgcggagttggaagaaaaggttgccgaagaagaagcagcgctgtcggacatagcaatgatcacgaatgtagtggggtccgagcaggtcgctgagaccgcggcgcgactgaccggcatcccggtccagaaactgacacaagctgagaataacaagttgatcacgatggagagggagttatcttcatccgtcgtgggtcagtccgaggctgtaaaggcagtctctaacgcaattaggttgtcacggtcgggtttagccaatccgaatcaacccgcttcgtttctctttcttgggcttagcggttcgggcaaaactgagctggcgaaaaaagtagccggctttctgtttaatgatgaaaaagcaatgatccgcattgattgttccgaactcggagagaaatggagttacaccaagcttttaggatcagagccgggtttaataggaagcgatcaaggtgggctactcactaaccagctcctaagacatccctactcagtcatcctttttgacgaagtggagaaagcagcgccggaggtactaaatatattgctgcaaatgctcgatgacggccgaattacggcgagtaatgggacgctggtcaactgtagtaactgtatagtaataatgaccagcaacttgggcgctcaatttataaactcggcgaagggctcgaagatatcaccagaaacaaaggagctggttatgacagccgtgcgggcgcatttccgtcctgagtttcttaaccgcatatcagccactgttgtgttcaataggttgtctcgacatgccatatctaagatagtcaaaatccgtcttgctgaaatagagcagcgtttcgaagccaatgcaaagagtataaaactggacgttgacgacgcggctattgaatatttatgtcgcaacggttattcgtcggatatgggtgctcgtcctttaaaccgattaatacagaacgagatacttaaccagttagcggtcctgatactcaagggccaagtcaaggacaaagaaacggtcaagattcggctgggttcgaagggcttggacgttcttccaaaccatgcagtagagtctgactccatggacgtagacgtggacgattgggtcgatgcggccgaggaggaagacagcgacaataatcatgacgatcaggcacccctctatgactaa

SEQ ID NO: 4088 - DNA, 2343 bp, Artificial Sequence
  Optimized genes for Pichia pastoris
atgctttccgctcgacgggtgttagctaagattaactcgcgtggtttagccactgttagcggactgacaaaagactcgctggtagaaatgaatttattggaaaagggaaactacataaactacaagcaacagctagataacgtgaatatagtgaaagaaaggctagggcggccactgacttacgcagagaagttactctacggacatttggacaagccgcatgaacaagacattgagcggggggtatcttacctaaaactccgcccggatcgaattgcttgtcaagacgcgactgcgcaaatggctatcctacaatttatgtccgcaggtatgccttcggtagcaaccccaaccacggtgcattgcgaccatttgatccaggctcagaagggtggcgccgcggatctggagcgggcgattcgacttaacaaagaagtatacgactttctcgcgacagcatgtgccaaatacaacataggtttttggaaaccaggtagcgggatcatccaccaaatagtcctagagaactacgctttcccgggagaacttcttatagggacggactcccatacacccaatgctggtggcctcggtcaactagccattggcgtgggaggagctgacgctgtcgacgtaatggcagggcttccatgggagcttaaggctcctaaaataatcggcgtaaaactgacgggtcggatgaatggatggacatcgccgaaagatatcatattaaaactcgcgggcataactacggtcaagggaggaaccggagcaattgtcgaatacttcggcgatggtgtggacacctttagttgtactgggatggcaacaatatgtaacatgggtgcagaaatcggggccacaacgagcgtgttcccatttaacaattcaatggtagattttttggatgccaccgggcgatcagagattggcgaatttgctaaagtctttcaaaaagaatatctctctgcggacccaggctgcgagtatgatcaggtgatcgaaattgatctcaacacgttagagccccacatcaatggtccatttacacctgatctagctacacccgtaagtaagatgaaagaagttgcagtggccaacgactggcccctggaagtaaaggtgggacttattggctcgtgcaccaacagcagctatgaggatatgacacgggcggcatcaataatcgaggacgccgccagtcatggcgtcaaagccaaatccctctacacggtcaccccagggtcggaacagatcagagcgacaattgctcgtgatggccaattgaagacctttaccgattttggagggagcgtgttggccaatgcatgcggaccttgcattggtcagtgggatcggcaggatatcaaaaaaggagataaaaacactattgtaagctcttttaataggaacttcacgagcagaaacgacgggaacccggctactcacgcctttgtcgctagtccagagatggtcaccgcctacgcaatcgcaggagatctaaggttcaacccactcacagacaaacttaaggacaaggatggtaatgagtttctgctgaaagacccagttggcgttggattacctgtgcgcggctatgacccaggtgaaaatacttatcaagctcctcccgaagatagggcctcagtggaggtcgtgatatctccttcgtccgataggctgcagcgtttaaccccctttcaaccttgggatggtaaagatgcagaacggctcccaatcttaataaaatcagtcgggaaaacaacgactgatcacatatctatggcgggcccgtggttgaagtatcgaggccaccttcaaaacatatccaacaactacatgatcggggccattaacgccgaaaatggcgaggcaaataacgtcaagaaccattacaccggagtatattcaggggtcccagatacggctgcggcatacagggataacggtgtcaagtgggtggtgattggtggcgagaacttcggagaagggtcctctcgtgaacatgccgccttggagccccgatatttaggcggttttgccattattaccaagagttttgcgagaatacacgaaactaacctgaagaaacagggcctgttgcccctcaattttaccgatcctgcggcttatgatcggattcagcctgatgacgaggtcgatatattggggctgaccgagctagctccaggcaagaacgttacgctcagggtgcatccagcagatggcagtccgacttgggaaacccccctatcgcatacctacaatgctgaacaaatagaatggtttaagtacgggtcagcgctgaacaacatggcggccgtgaaggcatcgaagtaa

SEQ ID NO: 4089 - DNA, 732 bp, Artificial Sequence
  Optimized genes for Pichia pastoris
atgccggaggttcttatatcaaagaagcggaaactggttgccgacggagttttctacgctgaattgaacgagtacttcactcgagagcttgcggaagacgggtattctggcgttgaggtgcgcgtcaccccaactacgacagaaatcatcatccgagcgactcagacaaactcagtgcttggggagaacgggcgcaggataagagagctcacggccttggttcagaagagattcaaaatcgatgaaggaaaggtaatattgtacgccgaaagagtgcaggaccgagggctctctgctgtaacacagtgtgaaagcctacgctacaagttgcttaacggtctggcgattagaagggcggcatacggagtggtccgtttcgtgatggactcaggcgcaaaaggcgttgaggtggttgtttcggggaagcttcgagcggcccgcgctaaatccatgaaatttgcagatggtttcatgatccattcggggcagccagccaaggacttcatagaaactgccacgcgacatgtgctgttacggcagggcgtactgggcataaaggtgaagattatgcgggaccccgcggcggcgaggacaggacctaaggcactacctgactttgtgaagattcatgagccaaaagacgagcgcgaagtccccgctccttttgtcaagtcgtatgtcgcggaacctgttgtggaagcggaagaggctgaagaacaagcgaccgcatga

SEQ ID NO: 4090 - DNA, 486 bp, Artificial Sequence
  Optimized genes for Pichia pastoris
atgcccatagatcaacaaaagttggaaaaattgcagaaatcggggccacggcgcgtgggtggagcaagactaaaacaaaagaggagtaatcgggacgcagaggctgatgatactaagcttcaagcgacattgcagaaatttaacgtccagaccctaacgggtgtcgaagaagcgaacttctttaaggatgatggcaaggtactacactttaaccgcgtaggggtccaggcggcggcaaactacaacacttacgcatttacgggctacgctcaggaaaaaaacataacagacttgattcccggcatcctaccccaattaggagcggagaatcttcaattcttgcaacaaattgccgagtcccttcagaagaaccctgatgccctaaacgccttaaaaaatcagaatcaggaaggggcagaagcggaggatgacagcgagatccctgagctagttgaaggggagacattcgataaaaatatcgattag

SEQ ID NO: 4091 - DNA, 1542 bp, Artificial Sequence
  Optimized genes for Pichia pastoris
atgacggtagttgaacccgtaggtgatgtgtttaacaccattttagttctcgattttgagtttaacgtgtacgcggagatgcttccgtgcactcagaaaatatctgagctgccgttcacaccaaccggggttatttttagtggaggccctttttcagtgtacgaagagggatcgcctcacgttgacaaggaaatttttaatctgaatgtcccaattctaggtatatgttatggaatgcaggagttagcttggatcgataatgtagaaaacgtcgcaaggggagagaagcgggaatatggaccagccacgctaaacgttcaggacaaggattgcgcactatttaaggatgtagatcactcccaagtctggatgtcccaccatgacaagcttcacaacctaccttcagggtttaaaactgtggcgacgactgagaacagccagtttgcgggcgttgccaatgaggccaaaaaaatctatggcattcagttccaccctgaagtgacgcattccgttcagggcaagactatattaaagaatttcgccgtaaatgtctgcggtgctacccagaattggaccatggaaaatttcatagacaccgagataaaccgcatccgaacgctagtggggccgaccgcagaagtaataggggcagtatctggtggtgttgattccactgttgctgcgaaactcatgaaggaggcaattggagatcggtttcatgccatatatgtcgacaatggcgtaatgagaaagaacgaaactatcacggttaaaaagacgctagatgatgggctcggaataaatttgactgtcgttgacgcgggtgagcagtttctatcccagctaaagggtgttaccgacccggaaaaaaaaaggaagataattggaaatacctttatccacgtctttgagaaggtggcggcagatattaagccaaaagatgggagcgaaatagaattcttactacagggtacattgtacccggatgttatcgaatcaatttccttcaagggaccaagccagacaatcaaaacacaccataacgtaggcggcctgactgagaatatgaagctaaagttgatcgaacccttgcgcgaattatttaaggatgaggtcagacacctagggcagctattagacatccccgaggatctagtctggaggcatccatttcccggtccgggcatagctatacgagtcttaggcgaggtgacccccgaacaggtgaagatcgctagagaagctgattacatcttcattgaggaaataaaaaaggccggtctctaccgcaaaatatcacaagccttcgccgcattgttgccggtcaaaagcgttggagttatgggcgatcaacgaacatacgaacaagtgatcgccttgagagctattgagaccagcgattttatgaccgctgactggtttgtgttcgaggctgcgtttctgaaaaaggtagcctctaggattgtaaacgaggtggatggggtggctcgagtgacttacgatataacgtcgaagccgcccgcaacggtcgagtgggaatag

SEQ ID NO: 4092 - DNA, 1437 bp, Artificial Sequence
  Optimized genes for Pichia pastoris
atgtcatcttttcgggtccttgacttagttaaacccttcaccccgttccttcccgaggtcatcagtccggagcggaaagtcccctttcagcagaaattgatgtggaccggtgtcactttattgatttttttggttatgtccgaaatacccttatacggtataacgtctagtgattcatcggacccactgttctggctccgaatgatgttggcatctaaccggggcaccttaatggagcttgggataagcccgatagtcacctccggaatggtctttcagttacttcagggtatccagattcttgatgtaaatatggaaaacaaagcagatcgtgagcttttccaaactgcacaaaaggtatttgcgattctactaagcatcggtcaggcgaccgtttatgtgcttacgggtatgtacggcccgccgggcgaactaggtgtcggcgtttgtttgctacttgtactccaactggtctttgctggcatagtagttatattactagacgaactgttacagaagggatatgggcttggaagtggaatatcactgtttatggcaacgaatatctgtgaacagattttctggaagacatttgcaccgacgacagtgaaccgtggtagagggaaggaattcgaaggggccttcatcagtttcttccatctgatattgactaagaaggataagaaacgtgcgcttttggaaagtttctacagagataatgccccaaacatgtttcaggtaatcgcgacgctcgtagtgtttttcaccgtagtatatctacaaggcttcaggctagaaatacctgtgaaatcaacgcgacagcgggggccttacgggacttatccaatacggttgttttataccagtaacatgcctattatgttacaaagcgctttaacgtccaatatttttataattagccagatgctatatagccattttccggacaatgccttcgtgaagttgattgggacttgggaggctcagccagggtctgcccaacttttcgccgccagtggacttgcctactacatgcaacctccaatgtcactgtcgcaggcgcttctcgaccccattaaaacggtggtctatgtagtattcgttctgacaacatgcgcgattttctccaaaacatggatcgaaatcagtggaagcagtccgcgtgatgttgctaaacagttcaaggaccaaggtctcgttatcgcgggtcatagagatgcgacggtttataaagagctaaagaaaataattcccactgcggcagccttcggcggcgctacaataggtgccctctccgtagttagcgacctactcggcacccttggctccggcacttcgattttgctcgcagtaactactatttacggctattacgagttggccgtgaaggagggaggtttttcaaaaggaggacctagcggctttgtcgatctataa

SEQ ID NO: 4093 - DNA, 1047 bp, Artificial Sequence
  Optimized genes for Pichia pastoris
atgcaagtgaaaagtatcgtcaacctcctcctcgcctgttcattagccgtcgctcgcccgctagagcatgctcaccaccaacacgacaaacgcggtgtagtcgtcgtcacaaagaccatagttgtagacggctccactgtagaggcgaccgccgcggcacaagtacaagagcatgcagaaactttcgctgaatcgactccctcggcagtcgttagtagcagtagcgccccgagtagtgcaagttctgcctctgcacctgcttcttctggttccttttcggcaggtacgaagggcgtcacttactcaccgtaccaagccggtggtggttgcaagaccgcggaggaagtcgcttcagacctaagtcaactaactgggtatgaaatcatcaggctttatggcgtcgattgcaaccaggtggagaacgtctttaaggctaaagcccccggccaaaaattgtttctggggatattttttgttgacgcgatcgagagtggcgtgtcggctatcgcgtcagccgtgaagagttatgggagttgggacgatgttcatacagtgtctgtaggcaatgagctagtaaacaatggggaagcaacggtttcacagataggacagtatgtttctacggctaaaagcgcacttcgttctgcaggcttcacaggcccagtcctatccgtcgacaccttcatagccgtcataaataatcccggactgtgcgacttcgccgatgagtacgttgcagtgaatgcgcatgccttttttgatggtggaatagcagccagtggagctggagactgggcagcagaacaaatacaacgcgtcagcagtgcctgtggtgggaaagacgtcctaatcgtagagtcaggctggccatcgaaaggggatacaaacggcgcagcagtgccctcgaaatcgaatcaacaagcagcagtccagtctcttggacagaaaattggcagctcgtgtattgctttcaatgccttcaacgattattggaaggcggatggaccattcaacgcggaaaaatactgggggatactcgattcgtag

SEQ ID NO: 4094 - DNA, 1074 bp, Artificial Sequence
  Optimized genes for Pichia pastoris
atgtccaaagccagcccggagaccactcatttactacaccacgatccgtatgataagaccgagagaagtgccgcacaaaaatcatcctggaaaaacaccttgtatataatattcgcgactgtggtatcggtgccactactttatctttttctagtctatctacctaaccttgcacccgaaagcgtaagtgagttacctatcatacgcaaggtcgacaaacttgactttagcaaccagctggaggtaccccggcgcctcatccttatcggggatgttcacggcagcttaaaaccccttaagaaactccttaggaaacttgactataacccaaagggtagcacagatactgtgcttttgttgggagacttcataagtaaaggtccccaatcggtcgaggttgttgacctggcgattaaaaataaatttcaatgcattttgggtaaccatgagatatcagtattacagcgttacaatcaatttcatggcttaagcggccttaaatatagaaacaatgagtctgacatagaaaattatgacttgcagagcggtcaattgtatcctctagacgatgaaatgcgacttgctaaacagttgtacccccggcacatagagtacatggggacatgtccgtttatatacgacctagggcccgtcccccgttataatagaaagcacacgaactataaggagacggttgatggcgtcgcagtgcatgctggattgaactggaatgtgcatgagctctatgatcaagacgtaacggaggttacggagatgcgcgcgatgcttcctcctgacttttcgaaagccaccgatgacaaatcgattcccgggagtgtgggatgggcaaaaatatggaaccactggcagaataacatcactgacagtgacgacttcgatggcctgaaaaacaggaaggtgtactacgggcaccatgctagcagggggttaaatgtccgtccttacacgatgggaattgacactgcatgtgttaaaggtgatagactgacagcggtagtgataacatatcacaaggggaagatccgtgagaaattggtaagcgtcggatgttaa

SEQ ID NO: 4095 - DNA, 1149 bp, Artificial Sequence
  Optimized genes for Pichia pastoris
atgtgtctccagtccatagttattgatctgttaactaacttccaggtgttgaagtattggggaaagcgagataccaacctgaatctccctactaatagttctatctctgtaacgctttcgcagaaagacttacgtacgttgacaactgtgaattctagtcgaaattttgagaaagactcgctttatctaaatggcgtgtcacattcgatcgaaaacgaccgtacaacaaattgcttggagcaactaagaagtctccgacaacagttagaggaggatgaccctaatctgccgaaactttctcagtggaaactacacataatatcggagaacaatttcccgaccgccgcaggattggcatcttccgctgctgggtttgccgccatggtggccgcgatttctaagctctacgagttaccgcaggatgcctcggaactttcacgaatagcaagaaaggggagtggatccgcttgccgtagcatgttcggcggctacgttgcatgggagatgggggagaaactcgatggcactgatagtaaagcggtacagattgcccctccggaacattggccgaacatgaaagcggctatctgcatcgtctcagatctcaaaaaagatgtctccagtacgagcgggatgcagaccacagtgcaaacctctgagctattccagtaccgtgttaaccaggtagttccaccacgctacagtcaaatggtagatgcgatcaaaaaccgagactttgagacctttgggacgctcaccatgaaagattctaacagtttccatgccacctgtttggactcctacccaccgattttctacctcacggacacgtcaaagaagattataaagttgattcataccttaaacgatgctattggaaaggtggtagccgcgtatacgtttgacgccggacccaatgcggttatttattatgaatccgagaacgaagaggtggttctgggcgttctattcggtgttctttccaacgtggacggctggaatgagatgaattctgcaaccctaaaggtacctgagggtgtacctttgtctagcttggattcgacgattgcgagtggagtttcccgtgtaatactaacgcaagtgggtgaagggccaaaagaaagcgatatgttcttagtcgccccttga

SEQ ID NO: 4096 - DNA, 492 bp, Artificial Sequence
  Optimized genes for Pichia pastoris
atgaattcaagtaaaagaagcattagtatccctcgtagtttctctaagttactctcttgtggtagtttttcattggttgctgtatctgacgagagtctaacggcctttaacgatctaaaactgggtaaaaaacacaaatacgtaatctataagattaacgatagtaaaacagaaataatcgttgataagatttctagcgacgaatcttacgacgcttttctggaggcacttcctgaggatgactcgcgttatgcagtatacgatttccaatatgaaatttcttccacagagggtaagaggtcaaaaataattttttttacttggtccccagagacagcatccgtccgcagtaaaatgatctatgcatcgagcaaggacgctctccgccgtgcgctcaacggcgtttccaccgacatacaagggactgattttagtgatgtcgcttttgaatccgtcctcgaaagggtaagtcggggggcgggatcgcactag

SEQ ID NO: 4097 - DNA, 897 bp, Artificial Sequence
  Optimized genes for Pichia pastoris
atgccaatcgaaattaaaggtaatgacgtagtgatcacttccagcagtacaacgcaaacacaggtacggattaatttatttggtgcgacggtttattcatggacaattgctgggaaagagcagctttggacgtcggacgccgccttgtttgacggtagcaagcccataaggggaggaatacccctagtctttcccgttttcggtaaaagcagtgcgccgggcttcgaaaaattaccacagcacgggttcgccagaaacagtacctgggaatttcttggtcaaacccatgctaacccaccgacggtccaattcggcttatcgccggacaacgtcaatagaaaggtatacaataattgggacaacggtgataatgagtttagcgttatttatacaatcgccctcgaggatgaacagctcgtgaccagtgtggagattcaaaacacagaccaaaaagaatggaagtttaactggttgttccatacgtatttcctcgttgacgatatcgaagatactttgattaacaacttaccgggggaaaaatgcaacgaccgcgtcgtgcatgagatctacaccgaaaaacaccctataattagttttgaccaggaggttgacagggtgtacagtgatgtttctacggataagttactccaaattatagaactcggcaaagttaaacacaacataaaacgggtgaacctacccgatgttgtagtgtggaacccgtggtcagaaatagttaaagaagtagctgatttcgagccaaaagagggctatagacggatggtatgcgttgagccaggatacgtggaacaattaaaaattttgaaacctggccaaagttggacagcaagtcaaattttacacaagggagacgacataaacttgcaggcaatctag

SEQ ID NO: 4098 - DNA, 603 bp, Artificial Sequence
  Optimized genes for Pichia pastoris
atgtcgatcccaccagaagttttgtgggcccagcgatcaaataaggatgatacttcgaaaaacgtggtctatttgacgattcgtattgcagaccctgagaatatcaaagtagatttgcagcctggtagtctggaatttgatgccgattcgcgtggaagcaaatatcacctttcgctagagttcttcgatgaagttgatgttgaaaaatcgaagtaccacacagctggaagtcacctattttttgtgctgcagaaaaaaaacgcatcagaggagttctggccacggctgactaaggagaaagttaagttacactatcttcatacggatttcgaccgttgggtcgacgaagacgaacaagatggggaggaggcggatccaacggttccagaccccagccagggaatggatttttcctctttgatgaataatgaggcattaagccaaagtctttcatcggatgccggccagcctgacatggcggctctgatgcagcaactccagaacagtggcgcaggaggtttggggggagagggagatcaagcattggatcgggcactcgaggaagattcaagcgatgaggaggaagaggacaagcaagagtga

SEQ ID NO: 4099 - DNA, 1089 bp, Artificial Sequence
  Optimized genes for Pichia pastoris
atgagcccggcaattaatatagctatcataggagcaggcattgtaggatcagcgttcataaaccagttgcgctctgtaagctcgttgttcgattttaacgtaatctatctggcgaaaagcaagtcagccttgatatcatacgactttaagcctcttaacttagcgaactggaaggccgacctagataactcttctttaaacccacttactgtcgaggagctgctcaagttcctgaaaaatagccccctccctgccattctagttgacaacacttcgtcggctgacgtcgcgttcgcttatccccagttcgtttctaacgggataagcgttgccacaccgaataagaaagcattcagtggtgacctaaacctgtggtcggaaatttttaaggcttcgggtgaacccaatggcggcctcgtgtatcacgaagcgaccgtgggtgccgggctaccggttataagtacaataaatgacctggtgaataccggggataaaatagagaagattgagggcattttttcgggtagcttgtcttacatattcaacaggttctctacaactaagccaaatgatatcaagttttcagagatagtgtccaaggcgaaggaactgggctatacagagcctgacccccgtgacgacctgtcgggattagacgtcgcacgtaaggttactatcctcgcgcggctctcagggttcaatgtaaaaagtccggactcttttccggtagacagtttggtacctcaggaattggagacattagaaacgtccgatgaattcctatctcggctgcacgagttcgactctcaagtaggccacctgaaagagcaggccgcaagcgaaggtaaggttctgcgttttgtagggactgtggattttccgaataacaaagtgtctgtaggctttggtaaatatgacgctagccatcccttcgcctcgttacagggttcagacaacgtgataagtataaagacggaacgatatcagaaccccctgattatccaaggcgctggtgcgggtgcagaggtaacggccgctggggtgctcgcagacgttatcaagattggccagcgaatatcgaagttataa

SEQ ID NO: 4100 - DNA, 951 bp, Artificial Sequence
  Optimized genes for Pichia pastoris
atggccgataatagggaagttttagtcctcaggggtactttagaaggacactctggatgggtcacttcacttgctacgtgtcctactaatcccgacatcctcctttccgggtctcgtgacaaaacgctaattgtatggcagctaaacggagacgaccaggcttacggtgtcccgaagaaagcgctaaaagggcacagtcacatcgtaagtgactgcaaattgtccctagattccgaattcgctttgtcttcgagctgggacaagacggtgagactatggaaccttaagaccggtgagattatcaagtacgcaggccataccagtgatgttctatccgtcgatctcagccagaacttgagagtgattgcaagcgcctcgcgtgataaaacgattaaattgtggaacatagtgggcgaagaggttgcgactttggaaggccacaccgactgggtaacgagtgtgcgcttcgtgcccggctcagcttctgacataatttcagctagttccgacaaactcgtcaagtcctgggatcttaacgaaatgaagctgacggcagacttcgtgggacacacgggatatgtgacagccatcacggttagcccggatgggtcactgtgcgcatcggccggaaaggatggtagcataatactttgggatttctcagtcaagaaggtactatatacgttggatgctaaggaagaggtccatgcggttgccttttcgcctaacaggttttggctatgtgcagcgacaagtaaaagcattaagatttttcacctagagaagcgtaagccaatggacgaactcaaacctgagtttgtttccacctctacaaaagcacgcgacccccattgtatttcacttgcgtggagcgcagacggccaaaatttattctcgggatataccgacaacgtgatccgcgtatggcaggtcatgacatcatcgtcctaa

SEQ ID NO: 4101 - DNA, 1875 bp, Artificial Sequence
  Optimized genes for Pichia pastoris
atgagctcctccaacaaagaatttgacggagacagcataggcagtagcgacagcctcgatatagaatcggggaatcgtgacccaaaaacccaaaatcctcaagcgtatgtaccgtccgataacgaggatcgtatgagtgagttaagtcattatgcgagcacgccggaccaaagtcttaagatggtcagaaccgaaacgaaaaaaagcttaaaggatttgggtgttagcgatgaactacctactcttgatcctaatcgtccaatcgcagtggaaaaccccatctttccagaggaatattatttagaaacagagacaggtctggtcccagtagctacgttgcaggacctgggcaggaacccgactgcgttagaaaaacttcggaaggaaaaatctcgagcattcccgcagccgaatggcgaggctcctatactaaaagactcctccgatgtagaaacttttaaaagtaaagaatactcccctgaaatcgagttcgtgacctttctcatcaatgacccggaaaacccatataattggcccacattcacgaaatgggcatataccatcatattaagcattctcgttgttgccgtagctttcggttcctcttgtatttccggtgcgctgttcaccgttgaagacaactataacgttagcctagaagtagctattctcaccgtctccctgatggtcttgggtttttcactcgggcctctgctgtggtcgccgctgtccgagcagattgggcggcggtgggtctacttcatatcactaggtttgtacactatctttaacattccttgcgcactctcgcctaatattggcggtttactcgtctgcagatttctgtgcggcgtgttctctagttctgccttgtgtctggtgggagggtctattgcagatatgcaccctagcgagacccgaggcaaggccatagcgtatttcgccgccgctccctacgggggtcccgttattggcccgctggtatgcggttggataggagttaagactaataggatggatctgatattctgggttaacatgggttttgctggctttatgtggctactggtcgcctgcatacctgagacctatcaaccagtcatactaaaaaaccgtgctaaaaagttgcgtatggaactaaacaacccaaacattatgacagagcaagaggccaatccacttactttcaaggaactggtcgtaacatgtctttatcgcccactcatgtttgtctttacagaacctgtgctagacatgatgtgtgtctacgtatgcttaatctattcattgctctatgcctttttttttgcatacccagtaatatttaacgagctttacgggtatgaggatgattttataggactcatgctcatacctatccttatcggggcttttttagctctcgtaaccaccccgatactcgaatccatgtatgttaagatgtgccaacgaaggaaacccaccccggaggatcggttagtgggagctatgattggtagtccctttccggccatagctctatttatactaggagcgacttcctataagcatatcatctgggtaggtcctgcttcctctggtatagctttcgggtacggaatggtcctcatctactattccctgaataattatatcatcgacacatatgcgaaatatgcggcgtccgcattagctactaaggtctttcttcgtagtgcgggcggcgcagcttttccccttttcaccacgcagatgtatcacaaactcggactgcagtgggcgtcctggcttcttgcgtttatctcgttggcaatgattctgatccctttcgttttctacatctatggggcccggctgcgggccaaaatgtgtaaggaaaattactcggagatgtaa

SEQ ID NO: 4102 - DNA, 2121 bp, Artificial Sequence
  Optimized genes for Pichia pastoris
atgtcaaaatccgagagttacgaattccaggcggagattagtcaactgctctcgctgtttataaacacagtctactccaataaagaaatctttttgagagaacttatatctaacgcatctgacgcattagataaaataagataccagtcgctctctgaccctaaagtcttagagactgaaccggaattgtttataagaatcacaccaaagcccgaggagaaagtcctagaaatccgtgattctggtataggaatgacaaaggcagacttagttaataacttgggaacgatcgcgaagtcagggactaaagccttcatggaagcccttagtgcaggagctgatgtatctatgataggccaattcggagtcggattttatagcctgttcctggtggcagatcatgttcaagtaatcagcaaaaataatgatgacgagcagtacatatgggagtctaacgcaggtggaaagtttactgtgtctctggatgaaaccaacgagaagttaggtagggggaccgtattacgtttgtttctcaaagatgaccagttggaatatctagaagaaaagcgtatcaaagaggttgttaaacgtcactcagagtttgtttcctacccaatccaactggtggtaacgaaagaggttgagaaagatgtccctgtcgaagaggaggaggagaagaaagaggagacggaggaggacgacaaaaagcctaagttggaagaggtcgatgatgaagaagacaaaaaggaggaggaaaaaaaaataaagaaggtcaaggaatcagttacggaaactgaagaacttaataaaacgaaaccgctctggacgaggagcccgtcggaagtgacgcaggacgagtacaacgcattttacaaatccatctccaatgactgggaagaccccctagcggtaaaacacttctcggtggaaggccaactagaattcaaagccatcctctttattccgaaacgagcaccctttgatttgttcgaaagtaaaaagaaaaagaacaacataaaattatacgtgcgtcgcgtgtttattacggatgaggcggaggaactaattccagagtggttatcgtttgttaaaggggtggtggattctgaggacttaccgttaaacttgtctagagagatgttacaacaaaatagaatcctgaaagtgatccgtaaaaacattgtgaagaaactcattgagacctttaatgagatagccgaagataaggagcagttcgaaaaattttacagtgctttctccaagaacttaaagttgggagtccacgaggactctcagaatcgatctgcactggccaagctcctgcgcttcaactcaacgaagtctactgaagaactcacatcgttttcggattatgttactcgaatgcctgagcatcagaaaaacatatattttatcacgggcgaaagtgttaaggcactggagaagtcaccattccttgacgccctcaaggaaaagaattttgaagtgctccttctaacagaccccatcgatgaatatgctatgacccagcttaaagagatagaagacaagaagttggtcgacattactaaagatttcgaattggaagagtcggaagaagagaaaaaagctagggaagaagaggtaaaagactttgagcctctaacgaaagccctaaaagagatccttggagacaaagttgagaaggtcgtggtctcttataagctggtcgactcaccagcagcgatacggacctcacagttcggttggtcagcaaacatggaacgtatcatgaaggcccaagcactgagagatactaatacgatgagctcctacatggccagcaagaagatttttgagataagtccgaaatcgcctattataaaggcgctgaggaaaaaagttgaagcaacgggtacagacgaccgggtagtgaagaatcttactacactcctattcgacacagctttattgacctcggggtttaccctggacgaacccacctcctttgcagcaagaattaacggcctgatctcaattggtctgaatatagacgaggaggaggagaaggaaccagagcaagccacggaagccccttcagaagaggcggttgcagagtcagctatggaggaagtcgactga

SEQ ID NO: 4103 - DNA, 375 bp, Artificial Sequence
  Optimized genes for Pichia pastoris
atgaccttccacttcagcattatctttcatatacgcttcacgaatacttttctagacaataccaagtcgaaccagatcaaagtcattaagactccagggggggtactaagagcacaacatacaaaaaaacgcggaacaaccccaaagtgcggcgactgtggtatctcactgccgggggttgtagctctccgtccgcgggaattctcgcgggcgaaaaagagcgataagtctgtatcacgaccatatggaggctctagatgcggcaattgcgtgaaagaacgcattattcgggcttttcttattgaagagcaaaagatcgtgcagaaggtgttaaaagaacaggccgaaaaggaaaagcaggcggaacaaaactga

SEQ ID NO: 4104 - DNA, 6648 bp, Artificial Sequence
  Optimized genes for Pichia pastoris
atgagttcggtaaaccattcgctacgtcacagcaaactgccgccacattttcttggcttaaactcggtagaggtcgctgcgccttcaaaggttagagattttgtcagagatcatggagggcatagcgtaataacacgggtgctgattgctaacaatggtatcgccgcagttaaggagattagatctgtgcgaaaatgggcatacgaaacattcgggaatgatagggcgattcaattcatagtaatggccactcccgaggacctggaagctaatgctgaatacattcggatggccgaccagtacgtaatggtccccggggggaccgcaaacaataattacgcgaacgttgatttgattgttgaaatcgctgagagtactgacgcccatgctgtttgggccgggtggggttttgcttcagagaacccgcatctaccggagcaactggctgcgagtcccaaaaaaatcatattcatcggcccaccgggatctgcaatgcgctcccttggggacaagatcagttcgactatcgttgcccaacacgcgaaagttccatgtattccgtggtccgggactggtgttgatcaagtgattatagacccggtaagcaacttagtgagcgttgacgaggaaacctatgctaaaggatgctgctccgatccgcaagacggtttagcgaaagccaaggctattggctttcctgttatgattaaggctagtgaaggtggtggaggaaaaggaatccgtaaagtggatagggaagaagattttctctccctctatgatcaagctgccaatgaaatcccaggttcgccgattttcataatgaagttggcgggcgatgcccggcatttggaggtccaattgctcgcagaccaatacggtaccaacatatcgttattcggcagggactgcagtgttcaaaggcgccaccagaaaatcatcgaagaagcgcctgtaacgatagctaaacaggatacattccggcaaatggagcaggctgccgtgcgtttgggacaactggttggatacgtaagtgcgggaactgtagagtatctgtactctcacgcagaggataaattctactttttagagctcaacccccgcttacaggtggaacatcccactaccgaaatggcaacaggcgttaatctaccggtcgctcaacttttaatagctatggggataccactcaaccgtatcagagatataagggtgttgtacggtctcgagcctaacggcgcaacggaaatagattttgaattcaaaacggaggaaagcctcaagtcccaacgcaaacccattccaaaaggacacacaattgcgtgtagaatcacttccgaagaccctggcgaggggtttaaacccagcgggggggctttatacgagttaaactttagatcatcgtcgtccgtttggggatatttctctgtgggaaataagagtagcattcacagcttcagcgactcgcaattcggccacatattctcttttggggaaaaccgacagatagctcgcaagaacatggtagttgcactgaaggaattgtccatcaggggggattttaggactactatcgaatatctgattaaattgttagaaacggctgattttgagaacaatacaataactaccgggtggcttgacgagctcatttctaagaaattgactgcggagcgccccgatgagacgacagcaatactatgtggtgcagaaaagggacagattcccggtaaggagcttctccgcaccatttttccgatcgaatttatctacgagggaaagaaatacaagtttactgtcgtacaggcagcctttgacaaatataatgttttcgttaacggctgcatgattacagtgagcgtaacccacctgaaagacggctctttattagtagcactggacggtaaatcgcactccgtgtactatctgcaggaagaagtgggcaatactagattaagcgtagacggcaagtcctgtattctcgaggtcgagcacgagccaaccgaattgaggacgcccagtcctgggaagctcataaaatatctggttgagcacggcgaccacgtcaagatcggacaaccgtacgcagaagttgaggtgatgaaaatgtgtatgccgttagtttctcaggaaaacggtactatcagattactgaagcagcccgggtcgtctgttgcggcgggtgacatattagctattcttgccctcgacgatccgtctaaagttaagcatgcactccccttcgatggcaccatccccgacatgaagcagccgtttatacattcaaacaaaccggtgtataaatttatttccctgctgagcgtcctcaagaatatattagcgggatacgataaccaggtggttatgaatgatacgcttcagagtcttctagacgttctgaagaacccggagttaccgtacagcgaatggaaccattcgataagcgcgttacattcaaggcttcctatccatctggatgaacaattgactagcttaatagagcgatcgcaccaacgaggagctgactttccggcgaaacacctccttaagctactcgacaaggaacaggccgtcaatcccgacccgttatttagtcaagtaattgcgccgctaacggcggtggcgaaatcgtatgagcacggattagaggtgcacgagcacaatgtcttcgcggatctcataacccaatactatgacatcgagtctctattcgctgataaaagggaggaggatgtcatactacaactgagagacgaaaacaagagttccctcgataaggtgatcgacgtagtactctcgcacagtagagtcggtgcgaaaaaccatctcatccgcgctattttagaaatataccagactatttgccaaaatgatctccaagcagccaccattctaaaaaaaccactgaagaagattgtggaacttgattcacggtttacagcgaaagtcagtcttaaagcacgcgaaattctgatccaatgtagcttgcccagcataaaggagagatcagaccaattagagcacattctgcggtcaagcgtagtgcaaacacaatacggcgaatcattcaacggcaattacaagctacctaacttggacgtaattcaggacgttatcgatagtaagtacatcgtattcgatgtacttactcaattcgtcgtctcgcctaacaagtatatctttgcagccgccgctgaagtgtatttacggcgcgcttatagggcatattcagtcagagaggtaaagcaccattttgtcggggatagcgctctacccattgtggaatggaaattccaattaccgctcctgtcgactgcggcgtataactctgtgccggaggccatgagaaattcgagctccaaccggtctagcatcagtatggatcgagcagtatcagtgtccgatctcaccttcatgatcaataagaatgactctcaaccgcttcgaacagggattataattccgacgaaccacttggacgatatagaggagtcattaagcagcgcaatcgacgtcttccccaaacgaccgcgcaacaatggaccggctcccgacaggactaatgttgccccggagcaacccacgaatgtctgtaatgtgttcatcgcgaatgtaagcgggtacaatagtgaggctgagatagtggataagatttccagtgtcttaagcgagcttaaggatgacctgcgagcgtcgggtgtcaggcgggtaacttttgtgttaggagacaaggttggaacatacccgaagtattacactttcaagttcccggactattttgaggacgagacaattcgacacattgaaccagcgctagctttccaacttgaactacggagactctctaactttaatatcaagcccgtgccgactgaaaataggaacatacatgtttatgaagctgtggccaagaacacttcgtgcatcgatagacgcttttttactcgaggaatcatacgtactagtcgtattcgagaagatgttacaatatctgagtaccttatttcggaagccaaccgtctcatgtccgatatactcgatgccctggaaattattgacactagcaacacagacttgaatcacattttcataaacttctcggcagtatttaacgtgaccccggatgacgtagaagcggcttttggtggcttcttagaacggtttggccgccgcttgtggcgacttagagtatctgccgctgagataagaattatgtgtactgatcctgagactgggataccattcccactccgagcgttaatcaacaacgtttccggatatgtcgtcaaatccgaaatgtatcaagaggtcaaaaacgaccacggcgagtgggtttttaaaagcttaggccctacgccagggtcaatgcatctgcggcctatcagcacaccctatccaactaaagagtggctacagcctaaacggtacaaggcgcacctgatgggaacaacatatgtgtacgacttccctgagctatttagacaagcgactttatcccaatggaaaaaatattctccaacagcaagggtcccgtcagacgtgtttgtcgcgaatgaactgattgttgatgacagcggtgagcttacagaagtgtcacgagaaccaggagcaaatgtagtaggaatggttgccttcaaagtcaccgcaaaaacacctgaatatcccaggggtagacactttatcattattgcaaatgacattacttttaaaattggatcgtttggtccacaggaggatgaatactttaataaagcaacacaactcgcaaggaaactcgggatcccacgcatctacctgagtgcaaattcgggtgcccgaattggagtagccgaagagttacttccactcttcaaggtagcttggaaagaggaagggaagccgtccaaaggctttgagtatctgtatctgacatcagaggacttaactctgctggagaagtccgggaaaagcaattctgtgacaacccaaagaattgtagaggagggggaggaaagacatgtaattacagcgataataggagcttccgatggcttgggggtggaatgcctaaggggtagtggccttattgctggggcaacaagtagggcatataaggatatttttaccataacgcttgttacatgcaggtccgttggcattggagcatacctagtccgcctcggtcagcgcgccatccaaatcgaaggacaacccataattctgacaggagcaccggcgattaataagctccttggacgagaagtttacagtagtaacctgcagcttggaggtacccagatcatgtacaagaacggcgtcagccatttgaccgcaaatgatgatctggcaggggtggaaaagattatggattggctggcgtacgtacctgctaaaagaaatatgcccgtccccatactcgaatctcttcacgacaaatgggatcgagacgttgattataaacccacgagaaacgagccctatgacgttaggtggatgatttctggcagggaaacaccagacggagagtttgagagtggcctgtttgattcggggtcatttaccgaaaccttaagtgggtgggcgaaaggcgtcgtagtgggtagggcaagactagggggcatacccatgggggtaattggcgttgaaactagggtaacagagaatcttataccggcggatccagccaatcccgattccaccgaaatgatgatacaggaagctggacaagtatggtatccaaactccgcctttaagaccgcccaggcaatcaatgatttcaacaatggcgaacagctccccctcatgattttggctaattggcgaggtttctccggagggcagcgcgatatgtacaatgaggtattgaagtacggaagttttatcgttgatgcactagtggacttcaaacaaccaatatttacatatattcctccgactgcggagcttcgaggaggtagctgggttgtagtggatccgactattaatgaggacatgatggaaatgtacgcagacgttgaaagtcgcgcaggggttctcgaaccggagggcatggtaggaattaagtacagaaaggacaagctacttgcgacaatggagcggctagatgcgaaatatgctgaattaaaatcaaaagtttcggacacatccttgtctgagaaggacgtgtcagaaattaagaagcaaatcgagcagagagaaaaacaacttttacctatttatgcgcagatcagcattcagtttgccgacttgcatgacaggtctggaagaatgcttgccaagggagtgataaagaaggaactagaatgggtcaattctcgcagattcttcttctggcgggttcgtaggcgcttaaatgaggaatatctgatcaaacgcattaccgaattcctgtcagcatcagcaacgcgtctggacaagataagtcgcatcaacagttggctccccacttctatagacttagaggacgatcaaaaggtcgctatctggttagaggaaaatcgaaaagcgctagacgccaacattaaggaactgcgtgcggaacacgttagacgaacgctagccaccctagtccggaccgacatggatacaacgtccaagtctctagcggagctaattaacctactgccggaaaccgagaaagagtctatattgagtaagattaaaagctag

SEQ ID NO: 4105 - DNA, 1698 bp, Artificial Sequence
  Optimized genes for Pichia pastoris
atgtcgttcagcccgcgtattgtaccgaccaccgcattctctgatcagaaacccggtacgtctggtctgcgcaaaaaagttacagtctttcagcaaccaaattacacagagaattttcttcaagcgattttcgatagtatccccgagggggctcaagattccgttttagtgatcgggggcgacgggcgctactataacgatacggtcgttcaattaatcgccaaaatcggactcgctaatggcgtgaaacggattatcgtcggacaaaacggtatcctcagtacgccagcaacgagccatatcatccgcacttataaggatgtcaaaccgacaggtggaatcatcctaactgcctcgcataaccccggaggcccaactaatgatctaggcattaaatacaacctttccaatgggggcccggcccctgagacggtgacggataaaatgttcgccaaatctttggcgctaactgagtataagataattgagaacctacctactatagatttgtctaagctagggctatcaaagtgcggcccacttgaagtagatatcattcattccactgaggcttacgtcgaaatgctcaaagacatattcgatttcccattaattaaatctttcatcaagaggcgtagccccgaagggttcaaggttcttttcgatgcactcaacggagtcacgggaccgtatggaaaatcaatcttcattgacgagcttggtcttcccgagagctctatacaaaactgtgtaccaaaggcggacttcggcggcttacaccccgacccgaacctgacctatgctaaaaccctcgtagaccgagtggataaagagaatatcgcattcggcgctgcgagtgatggcgatggcgacagaaatatgatctatggcgcatcaaccttcgtgtcacccggcgattcggttgctatcattgctgaacacgccgagagtatcccctacttcaaaaagctcggcgtacacggtcttgcacgttccatgcccacgtcgggagctctcgatttagtagcaaaagcaaaggggctcaatgtttatgaagtaccgacggggtggaagttcttctgcgcccttttcgacgcaaaaaaattatcaatttgcggggaggaatcattcggcacgggtagcgatcacataagggaaaaagatgggctatgggcgatcgtggcttggttgaatgttcttgcggcgtttgacgctcaacaccctgagattgaaggtggtgccacgatagccttagtgcaaaaaaacttctgggaaacttatggaagaacattctttacgcgttatgactacgagggctgcgaatccatcccagcaaacaaactcattgaatttctgcaggaaaaagtagatgacacctcctttgtaggttcggaacttgcaccaggatacacagtgaaagaggctgcgaatttcagctatactgacctggatggctctgtcagctctaagcagggcctatttgtaaaattcacgtcgggattgcgtttcattgttcgcctctcagggactgggagttcgggggcgaccattaggctctatctcgagaagcacacttcagataaatcaaagaattccctaagcgcaagtgagtttctagctgacgatgtacgatttgtactgaacttcttgcaatttcaaaaattcgtcgggagagaggaaccagatgtgcgtacatag

SEQ ID NO: 4106 - DNA, 324 bp, Artificial Sequence
  Optimized genes for Pichia pastoris
atggccgaggagaacagattatatgtaaaggggaagcacgtatcgttccaacgcagcaagagtgtcatccatcccaagacctctttaattaaaattgagggagtggaaaatagtaaagatgccgagttctacataggaaaaagaatagcttacgtttataaaggggtcaaggctataaacggtacgaaagtaagagtaatgtgggggacagtcacgcgtactcacggaaatagcggggtcgtccgagcaaaatttgagcggaatcttcctggtcagtcttttggctcgactgtacgaatcatgttgtacccatcgaacatttaa

SEQ ID NO: 4107 - DNA, 1251 bp, Artificial Sequence
  Optimized genes for Pichia pastoris
atgagtctatccaataaactcagcgtaaaagatctcgacgtggccggtaagcgggtatttatacgcgtcgactttaatgttcccctagatggggataaaataactaacaatcagcgaattgtagcagcgctcccgaccattcaatacgtactagatcacaaaccgaaggtcgtagtcttagcgtcacacctaggacgcccgaacggagaagtaaatccaaagttcagtcttaagccagtcgctgcagaactatcgtcgcttcttggtaagaaagtcacatttttaaacgattcggtgggaccagaagtagagaaagctgtaaatagcgcttccaacggtgaggttattctcctagaaaaccttcggtttcacatcgaggaagaagggagtcagaaaaaggatgggcaaaaaataaaagcggacaaagaagcggtggcgcgatttcgtaagcagctaaccgcgctggcagatgtatacgtgaatgatgccttcggaacagctcatcgagcacattcttccatggtgggctttgaactagaacaacgagcagccggctttctgatggctaaggagctaacgtacttcgcgaaagccctggaaaatccagtgcggcccttcttagcgatcttaggaggcgcaaaagtttcggataagatacaactgatcgacaacttattggataaggtagattcgatcatcataggggggggcatggcgtttaccttcattaaagtgttagataatgtcgctatcggcaattcactgtttgacgaggcgggcgcgaagctggtcccggggctggtcgaaaaagctaaaaagaataatgtcaaactggtactaccggtagattttgtaaccgcggatgccttctccaaagacgctaaagtcggggaggcaacggtcgaatccggcataccggacggtctacaaggattagatgcagggcccaaaagtcgtgagttattcgcagccaccatagcagaagccaagacaattgtgtggaatgggcctcctggggtatttgagtttgacaagtttgcagagggtactaagagcatgttagcggctgccatcaagaacgcacaaaacggaggcacagtgatcgtgggagggggtgacactgcgacggtagcaaaaaaatttgggggtgctgataaactgtcgcacgtgtcgaccggtgggggagcctctttagaactcttggaaggcaaggaactccccggagtggtctatttaagtaataaggcgtaa

SEQ ID NO: 4108 - DNA, 861 bp, Artificial Sequence
  Optimized genes for Pichia pastoris
atgtcaaatcaatacaacccctacgaacagaaccaatcatatgaattgccgtcctacaagggcggtaacaacgatgactttgtaaaattcatgaacgaaatcgcagatataaacgcaaatctcgacaattacgaggagttagtaaagataatcgaacagaagcaaacacaactagtcaacgaggttaatccagatcaagagaactcgctaaagcgacagctggactcccttatttctgaatcaagcagtcttcagctatcactcaaaagcaagattaagaacgcgcagcaactggcgattggagacagcgccaaggtcggccaagctgagaccagccgacagcggttccttcaggcgattcaagattatcgtatcattgaaagtaattatcgtgagcagcaacgggtccaggcagagcgacaatatcgggtagtgaaacccgatgcatcgccggaggaggtcagagacgctatagacgacttaggtgggcaacaggtattttccaccgccctccttaacgccaatcgaagaggtgaagcgaagactgccctccaagaagtacaatcgaggcatcgggaattgcaacgtctcgagaagacgatggctgagctgacgcagttattccatgacatggaggagatggtcgtcgaacaggaccagcatgtgcaagagactgagaacttggtcgatacagcccaacaggatattgaaaaagcagtggggcacaccgacaaagccctcacatccgctaagaaggctcgcagaaagaagtgtatctgcttctggatctgcgtgcttatcatttgcatactggcgcttattcttggcttggggtttggtgtaggcaactgggggcggtag

SEQ ID NO: 4109 - DNA, 1035 bp, Artificial Sequence
  Optimized genes for Pichia pastoris
atgaatcaaatcgagcagtccgggccaatagattgttctagtttgaagttgggatcacgcaaatccgccctagcaatcatccaggcagagatagtccgccaactaattctcaaagagtacccggagctagaaacgaaattagtatcagtcagcacgttgggggatcaggttcaaaacaaagccttattcacgtttggtggtaagtctctatggactaaggaactcgagatgttgttgttagaatctgtgggtggtttcgatcaaatagacatgattgtgcactctcttaaggatatgcctactcatttgcccgacgagttcgaattgggctgcataatagaacgggaagacccacgggatgctctcgttgtgcaagacgggctgagttacaagagtttagctgatttaccggaaggggccgttgtcggaacgtcatcggtccgacggtcggcgcaactgctcaaaaattttccgcaccttaaatttaagtcggtgcgagggaacctacagactagactgcggaaactggacgaccctgatagtgagtactgctgcctgctcttagctgccgcgggcctaattaggacgggcctccagcatcgtatttcaatgtacctaaatgatgatgttatgtatcactctgtcggtcagggcgcgctcggcgtggagatccggaaaggcgatcagttcatgaaaaatatttgcgaaaaaataggccatcgtactaccacactccgatgtctggccgagagggcactcttgcgctatctggagggcggttgtagcgtgcccataggtgtaagcaccatctactccgaggatacgaaagagctaacaatgaacagtcttgtagtctcttgcaacggtcgcgactcagtcacagaaagcatgacagaagtagtgacaacagaagagcaggctgaggacttcggcgaacgtctagctcagaagttgatcgatcagggggcaaaacgcatcttagatgaaataaattttaataaaataaaagagattaaagaggagggtctccattaa

SEQ ID NO: 4110 - DNA, 792 bp, Artificial Sequence
  Optimized genes for Pichia pastoris
atgtctgcatctacctactcgttcgatcaggcgatggactttgacatagtgcagtccgtaacctctacgcaggatcacattcctatggttttaggggaaagcgttctgcggtctttcgtggggaatgacgccaacaaagcccctgctataaaacaagagtatgaagcgttaccgctgaacgcacaaattgttaatccggaattgacacctagtgtaggtactattagccctttagagatacatacgagtgtgctcgacagcgtcctctccacagacttcacggacgccgataacagcccaatgttcgaatcacctgagtctgaggatcctaataactgggtaagcctcttcgcggacgagacgaccctcgctactactcctgcagtatcaagggcaccggcggcctccgcctcacctgtagtaccttcactgaaaaccacctccggtgacgaacaacagctaacagtgaaacaatttgtagaatacccctctgccaaagacaagctgtccccgaagtcagtagagaagaagatatcatttaaaaaggaccaccttggagtggtcggttacacaagacggcagcgctccagtccgctcgctccgattgtcgtgaaagatgacgatccagtgtcgatgaagagggcccggaacacagaagcagctagacgatctcgtgcgaagaagatgaaacgtatgagccaactagaggataaggttgaagagctccttatttgtaaatcagaactagaggccgaagtagaacgactaaaaagtttggtaaagcaccaatag

SEQ ID NO: 4111 - DNA, 561 bp, Artificial Sequence
  Optimized genes for Pichia pastoris
atggggaaagtgcatacttctaagcaacacgtcaaaacgtcgcataggaaggcacctaaatcagagaacacctatttaaaaagtcttgttgagctatactcttatttagcacgtagaacggatgccgaattcaacaaaaaggtaaggcgtgcattgaacttctcgaagataaatcgccctcccgtctccgtcggaaaaattagtcaggccttaaaaaaggaggaaaatgccgggaagatcgtggtcgtcgttgggacagtaaccgacgacataaccttactggaattcccccaagctacgattgcggcactgcgcgtaacagccactgcacgcgccaaaatactcaaagccggtggggaaattctaacattagaccaacttgcactcaaggctcctcagggggagaacacgttacttttggcaggttcccgcacagcccgtgaggcctgtcgccatttcggattcggcccgcaccaaaaaaaggccccgaggattttaagtacaggccgcaagtttgaaaaagcgcgggggaggcgtcagtctagggcgttcaaggtgtga

SEQ ID NO: 4112 - DNA, 1155 bp, Artificial Sequence
  Optimized genes for Pichia pastoris
atggacatagcgttggagattctggatacttttgttttcgacaaagtttatgctaagctattgccaattagcctcgttcaacacttaccagatgggtacttgaagacgttgggccacttgacaggcgctaacaacactatggaatccttgttcggcatagctccaaatgttgatcaggcgagtaaaaaccattggttacgcacggtaaatgactctattgccttagctaggcctggtgaacgacttgtgtacggggttaatgcgccactacatttttttgacgagaccgcatacacatacgcaagcatactcgggagatccaacatcattcggcaatttaccacccttatgatattgatgattttgtttggatggggactttatctaagcgtagcctccttttcttattattttgttttcgataaagcaatcttcaaccaccctcgctacctgaagaatcagatgtcacttgagatacatcaagccttgacagctatccctactatggtcctcttaacagtaccttggtttctaatcgaactgcggggttactcaaaactttactttgacgtcaacgagagcacagggggttggaaggcaattatctggcagattccgtgctttatcatgtttacagattgctgtatatacttcattcatcggtggttacattggcccagcgtatataagcgtctgcacaagcctcaccacaaatggatagtctgcacacccttcgcatcgcatgcgtttcatccagttgatggatacgctcaaagcttaccctaccatctctacggtatgctattcccattacacaaagtctcatatctaattttattcggcttggtcaacttctggacggtaatgatccatgacggagaatacttgagtcgagaccccatagttaacggcgccgcgtgccacaccgttcatcatctatatttcaactacaattacggccagtttacaactctttgggaccgcctaggtgggtcgtatcgaatgccagacaaggaattattcgacaaaaacaagaaaaaggatgttaagacatggcgatctcaggttaaacaagccgattccattagggaggatctggaagggaaagaggactttcgagaatacggtacagaagagaaactaaagagcacatga

SEQ ID NO: 4113 - DNA, 237 bp, Artificial Sequence
  Optimized genes for Pichia pastoris
atgccgaggcagatcacggatataaaaaagttcgtggagctaacaagacgtgcagatgtcaagtccgcaaccgtaaaaaccaactcaaaatttaacagcaaaggggaaaagtatcaacagacaaagtttaaggtgaggggtgcccgttacctctatacactaattgtagaagacgcagacaaggctaagaaacttgtccaatcattaccccctcagttaaaagtaactaagctatga

SEQ ID NO: 4114 - DNA, 582 bp, Artificial Sequence
  Optimized genes for Pichia pastoris
atgcctagggccccacgtacatactcaaagacatactccgtgcctaagaccccctatgattcggcccgatttgatcaggaactcaagttagctggtgagtacggcttaaagaataaaaaggagatctatcgaattggtttccaactgtcaaagattcgacgggcggctcgcgaccttttgacgcgggacgagaaggaccccaaacgtttatttgaagggaatgcgttaataagaagactcgtgagaacaggaatattgagtgaagaaaaaagaaaacttgattatgtgttagcattaaaagtagaagatttcctcgagcgtaggctgcagactcaagtgtttaagttagggttagccaaaagtatacaccatgcgcgcgttctcatcagtcagcgacacattgcagtagggaagcaaattgttactattccaagttttatggtcagactagagtcgcaaaaacatattgatttcgcttcaacatccccttatggtggaggccgcgcaggtcgggttaagaggaaaaatcaagcgaaaagtagtgaaggcggagctgaggaagaggaagaagatgaagaatga

SEQ ID NO: 4115 - DNA, 936 bp, Artificial Sequence
  Optimized genes for Pichia pastoris
atgatttttaacctaaagacgctagcagccgttgctatatcaattagtcaggtatccgcagtcagctcattaggttttgcacttggtaataagaatgttgatgggacctgtaagtatctggcggactacgaggcagatctagatactatacgtggcgggtccgaggccgtcgcaattcgagcctacagcgccgaggattgtaatactcttcagtacctgggaccagcagtagaggaaaagggatttaagcttgtcttatccgttagaccacttgatgagagttattatcaggcggaaaagaacgctttaagtgagtatctgccccaactgtccgtctcgactctacagtttctcagtgttgggtcggaagccctttaccgagatgacctgccagcctcagatttagccgataagatccgcgacatgaaagagtttctggccgggctgaccgacaaaaacggtgactcttattcgtcggtcccggtggggactattgactcttggaatgtcctagttgacgcatcggcagcgcccgcaatcgaggcttcggacgcagtctacgcgaacgcgttctcttattggcaaggtcagggaccaagtaattctacatattccttttttgacgatataatgcaggcgttgcaagtcatccaaacaattaaaggctctaccgatatcgatttttgggtgggcgaaactggctggccgactgatggcgataactttggtgatgcggtcccgtcgatcgaaaacgcggacaacttttggaaagaagcgatatgtggcatccggggctggggcatcaacactttcgttttccaggcctttgatgaagattggaaagaagaggacgatgccgttgaaaatcattttggcgtgtgggactcatcacggcagttgaagctcgacagccttggatgcgacttttcttcataa

SEQ ID NO: 4116 - DNA, 870 bp, Artificial Sequence
  Optimized genes for Pichia pastoris
atgtttcgactttcggtcgctaacatagcaaggtctgcaggtgcgtcaacgcgtaattatgcgaccctgcgtgaaatagagatgcgcctcaagagtataaagaatatagaaaagataacaaacactatgaagattgtagcaagcacccgacttaacaaggcacagcgcgctatggctacaagtcgggtataccacgaaggagaccaggaggtattcactaccgcagaaacgaaagcgccggaggacgctgaaaagactctgctggtcgttgtgtcaagcgataagggattgtgcgggagtatccacagtcagattgctaagtcggcgcggcttcgcctcaaggatcttcccaacgcggacgtcgtaactataggtgataaaacgaaagttcaactccttcgcacacaccccaacaacgttaaactgagttttaacggtatagggaaagaggctcctactttttatgaagccgcacttatcgcagatgaaattaagaaactaggtgactaccagaagattgaggtactatacaataaattcgtatcgggcgtttcattcctcccgtcggagttctctgtgttctctacagacgcaatcaaggcatccgaaaagttgtccacctttgaggtcgatgaagatgccgagatacctgcaaccctatcagagtacggcctagctaatagcatactcagtgcgttagctgacggatacgcttcagagatttcggctcgccgtaacgctatggacaatgcttcaaagaacgctggtgacatgataaacaagtacagcatactatataaccgcacgcgtcaggccgttattactaacgaacttgttgatattatcacaggggcgagctcattggactaa

SEQ ID NO: 4117 - DNA, 279 bp, Artificial Sequence
  Optimized genes for Pichia pastoris
atgtcgtcgttcctggacagatggctgtaccggatgagagggacaagtaacactggttcgtattatagtactcctcaactctccacacggtcttccggcttcccagatgatgatccacaaacgacgacacctaatttgaggaatacaccgcgtgcctatttccatcctgttatccctggagaccctctcactgaagaagagtcacttaagatgaaaaagtcctccgttgacagcagaaaatcgagcgttgtgagtgcttcgtccgaagagaacgaatga

SEQ ID NO: 4118 - DNA, 438 bp, Artificial Sequence
  Optimized genes for Pichia pastoris
atgaaccttcctgtaaatgccgagcgaaagaagagaattttgaagagctactcataccgaggcattgatctggaggcgttgctgaaactctcaaatgaggaattcgggaagttatgcacaagttctgtgagacgtaggttctccaggggtctgggggaccgggaagagagattcttgaagaagctacgcgtggtgaagcttgctacacccccgaatgaaaaaccagccgtggtaaagacgcatcttcgtaaaatgatcgtagtgcccgaaatgataggctcggtagtcggtgtctataatggtaagattttcaataccgtcgaaattaagccggagatgctcgggcactatcttggagagttcagcatgacctacacacctgtacgacatgggaaagctggcgtgggaaatgccgcgaggtttgcggccctcaagtaa

SEQ ID NO: 4119 - DNA, 171 bp, Artificial Sequence
  Optimized genes for Pichia pastoris
atggctcacgaaagtgtgtggtttagccacccacggaattacggcaagggatcgcgccaatgtagggtgtgcgcttcccaccaaggcttaatacggaaatatggcctaaacatatgtaggcaatgtttccgcgagcgtgcaaacgatatcgggttccataagtacagatag

SEQ ID NO: 4120 - DNA, 993 bp, Artificial Sequence
  Optimized genes for Pichia pastoris
atgtcggcgtcacaatttatgaagttgccatcgctacagccgagttcggagcaaaacgccctccctccgttacgtagtctggcggcgggattgttccctacacggctaatgtcggaaaatagtctctcgatgcaacacaatagttcagcatttctcgatagttactcattaagtaggggctctctttcccctcccatgtctcaaggtttggagtccatcgggaggagatcactaccaagcttgccgactttttcattcggtgatgtgcgcaataactcactaacctcgaccagtagccgagcatcttcgttatctggggacgatgtagagagcacgccctccgtccctaattcacctggttcaatccatgcccctggtagcatttcgtctctccgtggcaagaggcgccagcggtcggggccctcgtgtgacgcctgccgtgttcgtaaggtgaaatgtgacgccgagataatcatatccgattaccaggacctatcgatcgatgagaagctgatgttcgataagaatacacaggataaccaaacatttcagttgtcgaatggatttacaatacttaaaacgctagtgaatatcaagtcatccagagatgagaaatacattaaataccgctcttgtactgcgtgtaataatcgtacactgaagtgttgtttttcgaaagggttcacacgtaatgatatcgtaaaatataataagttcaagagtgagagctctgatgaggaatgttcagtggcaaagagagcaaaaactgcccaaacgactccacccccctcgactaactttgactcatctagtagttccttgtctccaaagtccacgctgactgctccgagttctgtcacccctccgctgctacccgctcgacggtcatcctgtttgaactgtcgcagtaaaaagataaaatgcgccagattggaggactccgaaagatgcacccattgcgataaaaaggacttgtgttgctcatttgaatga

SEQ ID NO: 4121 - DNA, 4971 bp, Artificial Sequence
  Optimized genes for Pichia pastoris
atgagttctgatatccctatagaattcactgaaccgttacaactgactgacataggaattcaacctcaatttttggattttcgaagcaccacattagaaagcgatcgatttgtttgtgttagggaacaaggcgcgaatgggaacacggtttcaattatcgatttacataataataacaacgtaactaaaaagaatatgaccgcggataatgccattatgcatcccagccagaatgtgatttctctgcgagccaatggtacaacactgcaaatcttcaatttggataccaaacagcggctgaaatccttcacaatgtcggaaccggttatcttttggaagtggctgaacgaacaaacactaggtctcgtaacccaaaacgcgatcttcgagtggaatgtattcgatggcaccggagacgggcccgtgcgtttagctgacaagcacgtatcactcacgaataaccagataataaactatgtgtcgaataaggacaacacttggattgcggttacgggcatcgcgcaggaggaaggacggattgttggtcacatacagctatactccaaagccaggaacatttcacaggcaatagacggccacgtatgtaacttcgcgacacttaagttgagcggagcttctgtagacacacaggtatttgtctgtggcaaccgaacagctacaggggggcagttgcatgtaatagaaattgatcatcaggagggcgcgccagtttttcaaaaaaagaatgtcgatatattctttccggccgatgcggccaacgactttccagtgtccgttcacgtttctcagaaatatggcatcatttatctcttgaccaaatacggatttattcacctctatgacgtggaatcctcgacctcgctgttcgtgaaccggataagcgcagaaccggtgtttacggctgcgtcgtacaacaacggcactggaattattgccatcaaccgatcaggacaggttcttaccgtcgatctatcgcgggaatcatttattccatacattctaaataagcttagcaatataccacttgcattgagtctagcttcccgctccggtttgccaggcgcagagaacttatttactcagcagttcaatcaatgtcttgcctcgggtgactatgataacgccgctaagatcgcagcgtcgtcagaacaactgagaacatctgagactatcaatcgattaaagaacctacagccagccccgggacagataagcccaattttgtcatacttctcgattctactcgacaaggggactcttaataagttcgagagcatagaactggcgaagcccgtgttgcaacaagacaaaaaaccgctcttcgaaaagtggctaaaagaggacaaactccagtcgagtgaagaacttggtgatatcgtcaaacctttcgataccaccctggcacttgccgtatacatgcgtgcgcaggtgcccgtcaaagtggtgtcttgcctagctgaaattgggcaatttgacaagatattgccatactgtgagaaggtgaactatcatccagaatacaccatactaattcaaaacatagtacgagtgaacccagacaaagctgcggagtttgcaacaagcttgcttcgccagacaccgggccttgacatagaaaagatagcagatatcttcttgtcacaaaactacatccaacaaggcacggcctttcttctggatgcgctgaaagatgataagcctgctgaaggccatcttcaaacacgcctacttgaaatcaatcttctgcatgccccacaagtggcagatgctatccttggtaataacatgttttctcaatacgacaggcccactatagcggcacttgccgagaaagcggggttatttcaaagagcgctcgaacatttcgacgatataaaggatattaagcgtgtaatagtgaatactcaagccttccccaccgattggttagtgaattattttgggaagcttaacgtggaacaatcggtggcatgtctccgcgagatgctcagcaagaacattgctcagaatctccaggtagtcattcaagtcgcgacgaaatatagcgatctaatcgggcccgtaaccctaataaaggtttttgaagagttcaaatgtacagaaggagaatattattacctcgctagtatagttaacgtcacgcaggagcccgaagtagttttcaaatatatagaggcggctgccaagttggggcaggtgaaagagatagagagggttaccagagagaacaatgtatataatggagagaaagtcaaaaacttcttgaaggaagccaaactcgatgaccaactccccctgataattgtttgcgacaggtatgatttcgtacacgaccttgtgttgtacctgtacaaaaacaaattttttaaattcatcgaggtatacgtccagcaggtaaacccatcaaaaacgccccaggttattgccggattgctggacgtggattgtgacgaagcgattatacaaagcttgttacagactgtaatagggcaggttcctatcgctccgttggtcgaggaggtagaaaagcggaatcgcttaaaattgcttctacccttcctagaacagactcttcagggaggctccgcggataagacagtctatgatacattggcgaagatatacatagatagcaacaacaaccccgagaaatttctgcaggacaacgataattatgataccctcgtagtaggtaaatattgcgaaaagcgtgatccttacctcgcctatatcgcctactcgaagggtcagaacgacgaggagcttataaagataaccaatgagaatgcaatgttcaagtatcaggcacgttacctgttatcccgctccgatcgccagctctggtccgtcgtattgtcagaggacaacatgtacaggaggcaactgatagaccaagtggtcgggacggcaatcccagaactcgaggaccctgagcctgtttctcttgcggtggaagctttcatggacgccgatctcccatcggaactcatagaattgttggaaaagattattctggaaccctcacccttcaatgacaaccccagtctgcaggaattattgatactgaccgccatcaaagccgatcaaactcgggtggactcatatattgagaagctagatgacttcgatcctgaagagatcgggtccttggcgaccgaagccggcctatatgaggaagcttttaaagtgtacaacaagtttgagttatacggcaaggccttaaaggtgttggtggaggacgtcatgtctctcgaccgaggagaggaatatgcggaaaagcttgacaaaccggagttgtggtcgcagctgggcgcggcacagcttaatggactgcggatacctgaagctattgagtcctatattaaggcgggcgatccatccaacttcgagcaagtaattgacatcgcggagcatgctggtaaagaagaagaactgattccctttctaaagatggcgcgcgagactttgcgggaaccgaaagtagatggggcaatcataaatgcgtatgcgaacacagatcgactaaacgatatagagcattttctgcagttgagtaacgcggctgatttggagtccattggtgataaactttacgaaaaacacaactatgaggcagctaagctgctttatagctcaattagcaactactcgaagcttgcaagtacgctcgtatatctaggggattaccaggctgcagtcgactgcgctcgtaaggcctcaaatgtaaaggtgtggaaacaggttaacgaagcgtgcatagacaataaggaatttaggctcgcccagatatgcggtttaaatctaataatccacgctgaagagttggacgaactggtcaacaagtacgaatattttggctatttcgaccagcttctgagcctatttgagaatgggcttggcctagagagagcccacatgggtatgtttacagagctggcagtcttgtacacaaagtattcccctgacaaaactatggaacacctcaaactcttttggtcgcggattaatatcccgaaggttcttcgtgcttgcgaagcggcacatctttggccggagcttatttttttgtattgtcactatgatgagtgggacaatgcagcattgaccataatcgaacgaagctctagtgccttcgaacactcgtccttcaaggaagtcatagtgaaggtaagtaatctagaaatttattacaaagcgataaatttctatcttaacgagcatccgtctctgttaacagatctattgagcgtaatgataccgagaatcgatctcccgcgagtggtaaagctattccaaaagtctgacaacctcccacttgtgaagccctttctgatatccgtactagataagaacaattcgattgttaatcaagcataccacgatttattgatcgaggaagaagattacaaatctcttaggtcagtaattgagagtaacgacaaattcgacgctcttggcctggcagaaaggctcgagaaacatgaagtaattttcttcaggcagatagccgcggtactctatcgaaagaacaagaaatggaacaaagcaatttccattttaaaaaccgatagactctggtccgatgtgatcgagaccgctgcaattagcggttccgagaaagtggctagtgagacgctccaatatttcgtcgaaactggaaataaggaatgtttcgttgcaaccttatatgcctgttaccacctcgttaaccctgattcgattctcgaacttagctggttacacggacttggtgattatacaaagccttatgaaatcagcattgcaaaaaacaaccaagatcgtattaacgagttgtataaagatctaaaaaagcgtcaaagccaggaaaccaacgcggatgacgagcaggcagggtcgcagcgcctactcttaacgaatggtaccggcataggcctacaaccaacagggaccggctttggagggttttag

SEQ ID NO: 4122 - DNA, 513 bp, Artificial Sequence
  Optimized genes for Pichia pastoris
atgagtcggaactttcagactgtgaaacggggtgatcgctttccaactgatgcaaccatgttccacattcccagttcgggagggggacccgcgccgtttaatctacgagagacagttcaaggcaaacgattcatcgttgtagctgcaccgggcgcgtttacttcaacctgtcatgaggaacatttgcctccctacatcaaaaacctaccaacgttcttgaagaaaggtatcgacttcatactagtaattacggcaaacgatgcatttgtattaaattcgtggaaaaaggcactgggggcggattccgataaaatcatttttgcatccgatacaaatctcgaacttgcaaataaacttggtttgacccttgacctcagtgttgcggggctaggccagcggacggggaggttcgctcttatcgttggcaaggacggcgttgtgcaaaatgtctttgcagaaaaggggcctgaggtgaaacatagtagcgctgacagggtgctcgcaaaactttga

SEQ ID NO: 4123 - DNA, 942 bp, Artificial Sequence
  Optimized genes for Pichia pastoris
atgcatagaacctacagcctgcgaaattcgcgggcgccaacagcaagccaaattaactctccagccccgccaccctcctctactaagcagaatcggtttttcggaaagggatcactatctaacactctcagacgtcagactgctgggagtttcggaccggaattatcaaagaagcttgcgcagcttgtcaagatggagaaaaacgtcatgagagcgattgaatcttcgtcctatgaacggaaggccgtggcgaagcaactatcattgtggggtgcggagaatgatgacgacgtttctgatattacagataaacttggggtgctgatatacgagattggcgaactcgatgaccaatttatagatcgttacgaccagtatagaataaccctgaagggaatcagggacatagagggtagtgtccaacctagccgcgatcggaagctgaagataaccgaccagatagcctatctaaaatacaaggaccctcaatcgccaaagatagtggttctagagcaagagttggtgcgggcggaggccgagtcgctggtggccgaagcccaattaagcaatatcacccgagagaagctcaaggccgcttttaattaccattttgactccactcgcgaacattctgagaagctggctctgatcgctggatacggaaaggccttgttagaactgcttgacgactcgcccgtcacgccaggggagacccgtcccgcctacgacggttacgaatcatctaagcagatcataattgacgccgagaatgcacttgcatcttggaccttagaaggagcggcagttcgtccaaccctatctattcgtcacgtagagggtgagtacgatgatgaagatgtcgagggactgaacgaagacacagataatttacatcttactgaggaagaatggcagaaggagcaacaggtacaaaacgcgtga

SEQ ID NO: 4124 - DNA, 1614 bp, Artificial Sequence
  Optimized genes for Pichia pastoris
atgtcctcaacagatatacaaggagaccaaggcgataacgaaaagatttacgccatcgaaagttcgccctctaacgaacaaattaaggacatccatgaggcgccggcggataacaaatcggagctcgatattccagtaaagcctaaaggctcatatatactcgtctcggtcttgtgtttgttggtcgcttttggcgggtttgtctttggctgggacacagggacgatttccggatttgttaatatgtcagactttacccgacgctttggacagtttaacggcgagacctattatttatccaaagtaagggtgggcctaattgtatcgatatttaatataggttgcgctatcggaggggttacattaggcaaattgggggacatatggggtaggaaaaaggctcttatgttcgttatggttatttatatggtcggcattttaattcagatcgccagcatagataaatggtatcaatatttcatcggacggataatcgctgggcttgcagtcggagcggtatcagtgctgtctccaatgttcatctcagaaacttcacccaagcacataaggggctctctagtcagctgttaccaactcatgatcacagctgggatttttctggggtattgtacgacgtacggaaccaaaacatacacggactcaactcagtggcgagttccgctcgggctgtgctttgcctgggcgattctgatgatagtggggatgacctttatgcctgagtctccgcgttttctcgtggaggtcaatagggttgatgaggcaatgaaatctattgcccgtgtaaataaagtatccattgatgatcccagcgtttataacgagatgcgactgattagcgatggaatcgagaaggagaaagaagccggtagtgtgtcttggggtgagctctttaccggcaaaccgaagatattttatcgcctcttgatcggaatattcatgcaaagcttgcaacaattaacaggtaataactacttcttttactatggaacgactatattcaaagccgtaggactagatgactctttccagacctccatcatactgggagtcgttaactttgcaagcactttccttgggatatataccatggataagtttggaagacgaaggaccctgttaggagggtcgggggcaatggtagtgtgtcttgttattttttctagcgttggagtcaaaagtttgtatgagaatggaaaggatgatccctcaaagcctgctggaaatgccatgatagtttttacatgtctattcatttttttttttgcatgtacgtgggcccccggcgtttttgtagtggtatccgagacttatccattaagaatacgttctaaaggaatggctattgcacagggtagcaactggctatgggggttcttaatagcatttttcactccattcataagcggtgcaatagattttgcctacgggtatgtattcatgggttgtaccctattcgctttcttctttgtttacttcttcgtgccagagacaaagggactttcattggaagatgttgatgaggtgtacgagaacttaacttttggcagggcttacgcatatagccacacaataaaagacaaaggggctttgtaa

SEQ ID NO: 4125 - DNA, 408 bp, Artificial Sequence
  Optimized genes for Pichia pastoris
atgcagttttccattgttgcaacgctagctttagcgggatccgccctcgctgcgtatagtaatgtcacgtacacttacgaaacgaccatcaccgacgttgttacggaactcacaacatattgccctgagcctaccacttttgtacataagaataaaactatcactgttactgcaccgacaacgctaaccataacggattgtccgtgtactattagcaaaactactaaaattacaacagacgtaccacccacgactcactctacaccacacaccaccacgacccacgttccgtcaacgagcacgccggctcccacccacagcgtgtctaccatctcccatggaggcgctgcaaaggccggggtagccggcctggccggtgtggcggcagcagccgcgtactttctttag

SEQ ID NO: 4126 - DNA, 792 bp, Artificial Sequence
  Optimized genes for Pichia pastoris
atgtctcaggcccctgccagtgcacagcagggtagtgcaccgcagggacaaaggcagtttggtggcgctcgcgggggtcggcgcggtccgaaacgtggacctaggcgaggcgaagaagaaaaaggctggacaccggtgaccaaactgggtcgcctggtcaaagcaggtaaaattacgtcgatagaggaaatatatctccattcactccctgtgaaagaatttcaaattatcgaccatctattgccggatttgaaagatgaagtaatgaagataaagcccgtccagaaacaaacgtctgcagggcagcgaacaagatttaaagcagtcgttgtcattggggactccaacggtcacgtaggattaggcattaaaactgcgaaagaagtcgcgacagcaatccgtgcggcgatcatcatagccaaactgagtattatcccagtaagacggggctactggggatcaaacctaggagcgccccattcacttgcgtcgaaaactagcggcaagtgcgggtcagttttggtccggatcattccagctccgcgtggttcaggtatcgttgcttctcccgcagttaaaaagatgatgcaattagcgggtgttgaagacgtatacacgagctctggagggtccacacgaactctagaaaatacgttgaaggcggcgttcatcgctatcgggaatacatatggctttttaacgccgacattatgggatgattacgagctttcagagtctccattggacgtctatgcggacgaagcctcagcatcgtataggaagcgttattag

SEQ ID NO: 4127 - DNA, 513 bp, Artificial Sequence
  Optimized genes for Pichia pastoris
atggtgcaggtaggtgacaaattcccaacggacgtagctcttacctacattccctggacgccggaaaactcaggtgtgttagcttgtgccatacctatcccatatgacttgagtaaaaagctacccggtagaactgtcgtaattgtgtctgccccaggagcctttacacccacgtgtacagcaaaccatataccagtttttatcgaaaaaatagatgagttcaagaaaaaaggggtcgatgacgtagtagtaatcacgactgacaccccatttgctaatgctgcttggggaaaagctctgggcgccaaggatgagataatcttcgcaaacgacccgctggcagccctttctaaagaattagggtacttgaaatctgaggttcccgccagttttggcatcaggggggcgagatatgcagtcgtcgtcaaggacggcgtggttagttacttcggcgtggagacgtcgtcgggcgttactgtgtccggcgcagacgcggtgctcgaagccttataa

SEQ ID NO: 4128 - DNA, 972 bp, Artificial Sequence
  Optimized genes for Pichia pastoris
atgacattaacaatcaatccatcgctgaagaatgtacttgaaaatcagaaagggggagctccagtagagaatgatttgaaagcattacgaaagcatgcagataagatcgaagagcattactacaaagaggttatcactaaaccatccgacgttgctgggatgcaatttactatcaccgcgcatgacggggaccagatcgaatgtcgtttctattcaaaggatgctgacccaaaccaagttcgaaccagtaagctcccttgcataatccattttcatggtggcggctacattacgggagacgtctcaagatactctcatctaacttcccagtacgtgagcgcgacgggtgtaccggtcctttctgtggattatcgcctggcaccagagtacccagctccaattccacaggaagacggttttagtgcactccaatatctctatgaacattgtgataatcttatgattgaccccaataaaattatacttatgggggattccagcggggccggattggcgttaagtgttgctgcactagctgcggagcggggaataccaattgcaaagcaaattctgatataccctatgctagattcaaacaatacagaagagccagactcggaggatctgaaagaaaagaaaccctacctgacttggactcatagaatgaacaagcttgctttcgactctttgctatcagagaaggaagaatatgaaccttcgttattcccattcaatgacccgaacgtggattggagtaagttccctaaaacttacctggaaaccgtcaccgtagacatcttgaacgatgatggccggcaattgcatcggaacttaacggagaataacgtgcaagttgaatttcacgaatgggaaggcctgtgtcatggttttgaacctttgctgtggacggaagagaatgacttactacaaaacattttggaaaaaagatatcaggccattctggacgtatag

SEQ ID NO: 4129 - DNA, 735 bp, Artificial Sequence
  Optimized genes for Pichia pastoris
atgccgcaaaagactacaagtaagtacttacttatgatcccgatctttaaccggttagcattcggccagtgttgtcgttttgtcaaccacctatccggtctgaaactcgatgaagaaaagaaggcgataataagtgagcgaacagcaaaatattacgaggagtacgaagaggcggcgagagtcctggagaaggcaaagagtgacgccgccgcgtcaggcagctacttcgtcgaagcagagcctaacctagtcctcgttgtccgtatcaaaggcatcaacaaaatagctccgaaaccgaggaaggtgctacagctactacgcctcttacaaattaatgcggccgtgttcgtccgtataactaaggctacagcggaactactacgattggtcgaaccctatgtggcttatggttatccctcccttgagaccgtgcgtgaattgatatataagagaggatacgggaaactcaacaaacagagagtaccgcttacagacaacgatatcatcgagaaggtgttggggcaatacggaatcatatccattgaagacctaattcacgaaatctatacagtaggacccaacttcaaacaagcaaataattttctttatccgttcagactttcgaatcctgacggaggttggggcgtacgtcggaaatttttccattacatccaaggcggggcgactggcaatagagaggaacacatcaactctcttgttaagaaaatgaattga

SEQ ID NO: 4130 - DNA, 444 bp, Artificial Sequence
  Optimized genes for Pichia pastoris
atgtcgctgtcgacattcaacgctgaggaagccgagaacctggacgacatcgagaaacagttcgctgttaaggccgtgacacaagctgagacatattggaacctcctgactaaaatccctgggacgaaactgaagttaactccgtacgatgacgagattttcgaagcgctgctcaaggattttcctgagtttgagaacccggaatatgcctctaagattaatgaagatgaaatgaagagcttatctgggaaagaaaggtggaggaaattcatgaagccatttgaagagaaaatcgatgactttaactttggtaccctccttcgtacagactcgtcaaaggaatacgatcaggagggcacaatattcgttgtacgcctgcaattctacgctatagagatagcacgcaacaagtatggtctgaacgactggatatcccagaaataa

SEQ ID NO: 4131 - DNA, 1488 bp, Artificial Sequence
  Optimized genes for Pichia pastoris
atggaacaaccccaggcaatggaaaaggttgaatcagttgacgtgacggaggccaatgcggtagctgccggaacgaataagcttacgaaacgtattgttgcggcagggcttggaggaaaactgatgggtaccaaatctatggtagatgttactgcggatcagctcgccaaagacagcattaacgagctgctagcgcgagataaggcattaaaggaaaaatatgagaaacaaaagcacatttcggagcagccgtggactaaggacaactggcaccagcatatcaattggctcaacatgatccttgtctgtggattacccttgtttggtgcgattgcgacttactataagccgccgaccaaagaaacggtgatattgggtgtcgtattgtatattctaggtggccttagcattacggcgggttaccatcggttgtggtctcaccgagcctattccgctcgcacaccgctaaaagtgctgttcgcactcttcggcgccggcgcagtcgaaggttcgatcaagtggtggtcccattcacaccgggtccatcataggtacactgacacgcatcgtgacccctacgacgcgcgcaaaggattttggtatagccatatgggctggatgcttacgaaaccaaacccacggtacaaagccagagctgacattagcgacctcgccgacgattggattgttcgcttccagcatcgtcactatctgttgatcatgaccttcatggcccttatactcccgactatcattgctaagtacttttgggatgatgcctggggcggcttcatttacggcggcattttcaaagtttttgttattcaacaggcgacattttgcgtcaatagcttggcgcattggattggagttcagcctttcgatgaccgaagaactccgcgtgatcactttctcactgccatcgttacgtttggggagggctaccacaattttcaccatgaatttccatcggactaccgtaatgcgttaaagtggtatcagtatgacccaacaaagattgtgatttacttatcttctaaagttggattgtcttataacctgaagacattttctgacaacgcaatcaaacaggggttggttcaacagcagcagaagaaactagacagcatgcgagcgcacttgaattgggggacccccctccaggatttacctgtctgggataaatcagaatttttcgaaaagtcaaaagataagaaaggtttagttattataagcggtatagtacataacgtcgaaaacttcatcggcgagcatcctgggggagagaaactcgtaaagggcgcgcttgggaaagacgctactacagcttttaacggcggagtatatgcccactcgaacgccgcacataatttactcgcaactatgagggtagccgtcatacgcgacggtaacgccaatgcgaataccttcagtctccaaaacgaatttttggacaaaaaagcagcggctgcggcagcctcaaactga

SEQ ID NO: 4132 - DNA, 1626 bp, Artificial Sequence
  Optimized genes for Pichia pastoris
atgagcgaaaagtactccagacctgctcaaccccctcccacatataaccagccaggcggtgggcaatcgccttttaatgagccttattacccgcagcaaggggtcaatagcagtgactaccaccagcagcaacgacctgactacgacccagaatctcagtttcccccagagaaaatagtcgggtctggaaaaccggataatgctgagacatttgatgattcattcaaagtcaagaataagctgaatgactggcccttcacgatattatttatagctaccttagcagggtttgtcgtcgtagcagggatagtcctgtctgcgtgggccagtaactacagtacgtcgggatcaggtatatacgattctggagcaagctttacactaaacacgaataccgtcgtgctttttgcattcgtaattgttatatctttagtccttgcggtattaatgctttgttttgctcgaatagcaccgaaacggtttatacaggtagggattgtgcttaacgtggttttgggactcgcgagttcgatttattacctagcggttggctattactcggccggggtcgttttcctagtgtttactctcatatcagcttactgctactggtctatgcgggggcgaatccctttctctgcgacagtgcttacgattgtaatcgacgtaatgaagagaaatccgagtactctgatgacatccctcatcggaattatagtctctggtgcgttcgctgctttattcagcgctacagtagtggccacttatatgaagtggactccctccgacgagaatggtaattgtagctttaacgagggaagtacgtcgtgctctcgctctaaggtcataggcatcttggtattcgtcttttttgcgggatactacataacggaagttattggaaacgtcatccacgtcacaatcagcggagtgtacggttcctggtattatttaagtaggtcggatcaggggatgcctaggttccccgcattgggggccttcaaacgggcaatgacgtggtcattcggatccatttgtttcggtagtctcatagttgctttgctgcaattattaaaaacgattattcagatcttgaaaaacgacgcaatgcaaaacggagaaggctggcagactataatcctgtgttgtgcagattgtatcctggggttgatagagtgggcggtgcgttattttaatcattacgcgtactcattcgttgctttatatggtgaatcgtacatgaagtcagcacgcgccacatgggacttatttcgtgcgaagggtttagatgcactggtaaatgactgccttattggcgccgggctcagttttttcgccttatttgtgtcctatctgtcggcacttttcagttacctttacctcaggtacacggcgccaggatacaatagcgatggaagcttctatgccccagtaatcgctttcacctttgtaatagcactccagatagtaaatatcgcgtcatctgtgatcaggagcggaaccgcaacgttctttgtatgtttagcccgtgaccccgaggttttccaaatatcttacccggatgagttctcacgaatttttgctgactaccctcaggtgatgaataaagttgcagctagacagtaa

SEQ ID NO: 4133 - DNA, 447 bp, Artificial Sequence
  Optimized genes for Pichia pastoris
atgcagtttaagtccctgatcggagccaccttggccctctctgttgtgaaagctacgacagaactagaacccatattcactaacgatgtcaatgtgacggtacccactgtgccgccggaaatcacatccacaccagatgttagtgttccgggtaacttaaccgaaaccgggggcctaacgaatactacagggactggtggcttcacaaacacaactgcgacaggtactggcgggtttacaaatacaaccgctactggcacgggcacggggacaggaaccggtacgggaacaggcactggaacaggaacgggaactggtacgggaaccggcaccggcaccgggactggaaccaccgggactgggactgaaactggtaatggcgcgcaggcagtgttaggctctagcgtcttagctgccgccggattgtttgttgcgatgctaatctaa

SEQ ID NO: 4134 - DNA, 405 bp, Artificial Sequence
  Optimized genes for Pichia pastoris
atgtccacagagaaccaggagatcaaggaacagatagatgctaccaatcaagagattgtaaataacgcccaggaggcagccgaaccggcgacagaggctgttgctgagtccagtactcaagctgaggcaacgggagaagttactagcgaacatgcgaagagcctgaaggagaagacagaagaattcttggatcactcaaaaaaagaggttgagcatgctttcgagactgcaaaggaaaaggcagatgagcttgtgaaaggtgccaaggcaaagaaaacggaggctgcggagtcgaatgcagagacttctgaggctgcgacggagagtgctgataaagtggaggaaaaaggaatcaagaagtattttacgaaatttaagaatgtcataaagaaggtagcaaattaa

SEQ ID NO: 4135 - DNA, 1005 bp, Artificial Sequence
  Optimized genes for Pichia pastoris
atgctgtcgacgatcgccaagcgacaattttcgtcatcagcgtccacagcctataaagtcgccgttttaggagccgcaggcggaatcggacagcctttatctcttttaatgaaactcaaccacaaggtgaccgatctcgcgctgtacgatatacgattagctccgggggtagccgccgacgtatcccacatcccgacaaacagtacagtgactggctacacgccagaggataacgggctagagaagacattaaccggggccgatttggtaatcatcccggctggggtccccaggaagccaggaatgacgagggacgatctcttcaacacgaatgcgtccatagtccgggacctagctaaggcggttggggattatagtccatcggcggctgtagcgattatatctaatcctgtgaacagcacggtgcctatcgttgccgaggtactaaagtccaaaggcgtgtataatccgaagaagctttttggcgtaaccactctagacgtcttgagagcctctcggttcttatcccaagtccaaggtactaacccagcgagtgaacctgtaactgtagttggggggcacagcggggtcactatagtacctttactctctcagagtaagcataaagacttgcctaaagatacgtacgatgcgctagtacatcggatccaattcggcggagatgaagtcgtcaaagcaaaggacggcgcgggctcagctaccctatcaatggcacaagccggggctcgattcgcatcttcggttctcaacggattggcgggcgagaatgatgtggtggaaccctcattcgtggactcgcctttgtttaaagacgagggtatcgagtttttttcctcaaaagtgacactggggccagagggcgtgaagactattcatggtctgggcgagttatccgccgcagaggaggaaatgatcactacggcgaaggagactttagcgaagaacatagccaaaggccaggaatttgttaaacaaaatccatag

SEQ ID NO: 4136 - DNA, 1341 bp, Artificial Sequence
  Optimized genes for Pichia pastoris
atgtccgacaatgcaaacgagacaagctcctcactgctagataacgtgtacttggactcatctgatctcctgatagcgcgttatgacaaatggatcctagccttggccttctttgagaactttttcgccagatacgatagtattctgagtagcacggctaaggattatggtaagctagtaaagcatttctctaccgataccctcccacagtttgaggtgtctccgtcttccaacattgcgggagcggtgtatgggagcgttaacagtgaagcagatcccaataaaaacgttactggcgttaacagttttatcgaactcctgaagttccggtcgtccgaagaccagggtaaaatcgcagggcttgagacgtctatcagagagcagatcatacccgagtttaaaaaatattcagcagatttgagcgcaaagaaaaaggatttgaccgccgatgcttccaaacagcgtaaggagctcaaaaaacttggtctacacttgagtagtagcatctccaagcttcagcattctactcaagtattcgagagcgccagtggcaccggcaagatggattataagaatgatccatacatgctcaaacgagctgtgagcctccatgggactgagctgatagcaaaggaacacaaccacatggattttttaaagcgcgaagagctctccttgatgacattagaaaagcgtaccctggaattcatacaactgatctttgctgatgtttctaacagaattactgcagctgatagcgttttctcgcgatcgttcgactcgttgtcaaaaactctatcgagtattgaccttgagtatgagtggaagcagttctcagaagttaacaagcaacgcctggttactgttgagggcaatgatgacattagcggagcgaacatctccgctgataacaagaagaggggactatcagatttatcgtttccaaacgatcaccaccctgccacagagcccatactggaagggatattgcaacgtaaagaaggaaaggtaaataaaaagtacgtttcagagtattatgtcattacgaaaacaagatatttgtatgaattcgagagtaacgctccaaagaattcaacgcaacccaacaccgttctatatttgccggaatgtaccttaaagtcattaaacggccccgataattctaagttcaaaattgagatttccggcaaagacgccactcaagctttctccgttataaaaagtaccttgatcctaaagacctcgacctacgatgagatgagaacttggttcaatgtgctttcggaagttagcggcctaatgcagacgcaggaggaatcgagattggacagccctaactaa

SEQ ID NO: 4137 - DNA, 1515 bp, Artificial Sequence
  Optimized genes for Pichia pastoris
atgactgacactaaagcagtcgagtttgtcggccatacggcaattgtcgtgttcggcgcgagcggagacctcgccaaaaagaaaacttttcccgcactctttggcctttatcgcgagggctatctatcgaataaggtcaagataataggctatgcacgcagcaagttagacgataaggagttcaaggaccgcatcgtcggttatttcaagacaaagaataagggcgatgaggacaaagtgcaagagttcttaaagctgtgctcgtatatttcagctccctatgataaacccgatggctacgagaaattaaacgagacgattaacgagttcgagaaagaaaataacgttgagcagagccaccgacttttttatctcgcccttcccccctcggtgttcattccggtcgccaccgaggttaagaagtacgttcatcctgggtctaagggaatcgcccgcatcatcgttgaaaagcctttcggacacgacctgcagtcagccgaggagttactgaatgccttaaagcccatctggaaggaagaagaactatttcgaatagatcactatcttggcaaggaaatggtcaaaaacttgttggctttccgattcggtaatgcgttcatcaatgctagctgggacaatcgccatatttcttgcattcagattagcttcaaagagccgtttggaacggaaggtcgtggtggatattttgatagtatcggtatcatccgagacgtaatccagaaccacctgctacaagttctgactctactgacaatggaaagacccgtatcgaatgacccggaagcggtacgtgatgaaaaggtgcgaatactaaagagtatctccgaactcgacttgaacgacgttctggttggacaatacggaaaatctgaagatggcaagaaacctgcatacgtggacgatgagacggttaagcccggaagtaagtgcgtgacttttgccgcgattgggttgcatatcaacacagagcggtgggaaggcgtcccaataatcctgcgcgctgggaaagcacttaacgaaggcaaagtcgagattagagtgcaatacaaacagtcgacgggtttcctcaatgacatacaacgcaatgaactggtcatccgtgtgcaaccgaatgaagccatgtacatgaagctaaacagcaaagtccccggggtctcgcaaaagacaacagtcactgagctagatcttacttataaggaccggtatgagaatttctatatacctgaggcctatgaatcgctaattagggatgctatgaagggtgatcactccaactttgtgagggacgacgagttgattcaatcatggaaaatttttacacctctgctctatcatttagaaggtcctgatgcacctgcaccggaaatttacccttacggctcacgtggtccagcgagtcttactaaatttttgcaagaccacgattatttcttcgagtcaagagacaattatcagtggcccgttacgagacccgatgttttgcacaaaatgtga

SEQ ID NO: 4138 - DNA, 1083 bp, Artificial Sequence
  Optimized genes for Pichia pastoris
atgagcgtgatgaaggcgctcgtttacgggggtaagaatgttttcgcttggaagaacttcccaaaacctaccatcctacatccaacggatgtaatcgttaagacagtcgccacgactatatgcggcactgacttgcatatcttgaaaggtgacgtgccagaagtcaaacccgagacggtgttaggccatgaggctattggggtagtagagtccatcggggataacgttaaaaacttttcaattggggacaaagtgcttgtgtcttgtatcacaagttgcggatcatgctactattgtaagcgaaatctgcaaagtcattgtaaaaccggaggctggaagttgggtcacgatttaaacggcactcaggccgaatttgtgagaattccgtacggtgacttctccttacaccgaattccacatgaggccgacgaaaaggcggtcctcatgttatcggatattttacccaccgcctacgaagtgggcgtcctagccggaaatgtccaaaagggggattctgtagctatcgttggagccggtcccgtcgggcttgctgcactgttgaccgtaaaagcatttgaaccatctgaaatcattatgatagacaccaacgatgagcgcttatcagcgtctttgaaattaggagctacaaaagcagtaaaccctaccaaagtaagctccgtcaaggacgcggtttacgacatagtcaatgcaacagtgagagtaaaagagaatgacctagaaccaggcgtcgacgtagcgattgaatgcgtgggtgtaccggatacatttgccacatgtgaggaaattatagctcctggaggtcgcatagccaatgtgggagttcacggcaccaaggttgacctccagcttcaggatctatggattaagaatattgctattaccacaggactggtagcaacctactcgactaaagacttacttaagcgcgtctccgataagtctctcgacccaacgccacttgtgacccatgaatttaaattttctgaatttgagaaagcatacgagacgagccaaaacgctgccaccacgaaggccattaagattttcttgtctgctgattag

SEQ ID NO: 4139 - DNA, 2475 bp, Artificial Sequence
  Optimized genes for Pichia pastoris
atgctcaaagcgaggactgtaaaacctaatcagctgcgtctaaacgccctgcgggcaaaagtgcctcgcatattgctcgcaagcagtctgtctacgttgtctttgcgtacatcatctaacaccttggccgtacgaccggtgcaaccgaagataccatttgcccgacataacgtgaaccatcttcgccttcggacccccatgtcgattcgtttcgcctcaagtggggggcctcaaatcaacatgaatggacagcaagaagaagagctgcccgccttacaaaaatatggtgtgaatctcacccagctcgctaaggacggcaaactggacccagtgatcggcagggatgaagaaatacgccgtaccattcaaattctcagtcgaaggaccaagaataatcctgcgttgatcggtaacgccggtacagggaaaacagctataatggagggcttggcccagcgaattataaagggcgaagtcccggaatccatgaaggacaaggaagtggtagcccttgacctcggttccctgatttctggggctaaatttcgaggagaattcgaagaacgcctgaaagccgtcctcaaagaactagatgaagcccatgggaatatcatattgttcatcgacgaactgcacatccttctgggattagggaaggccgagggatccatcgatgcatcgaatttgctgaaaccggccttagcaagaggacaattacagtgctgcggggcaacaacaatcgaagagtatagaaagtatattgagaaagacgctgcactcgcacggcggtttcagtccgtcctggttaatgaaccgtcggtgcaagatgcgatatcgattctaagaggcctcaaagagaaatatgagatccaccatggagtgaggatcactgactccgcgctcgtcaccgcggcggtctattctaatagatatatcacggaccgcttcttgcccgacaaagctattgatctggttgacgaggcctgctctgccctacggctacaacatgagtctaaaccagacgtgattcagcagttagaccggcagataatgacgatccagattgagttggaaagccttcgaaaggagacagacccaatatcagtcgagagacgagacaagctggatgagcaattaaaacttaaaaaggaagagttagagcgcctgactcaggtctgggaggacgagaaaaactcgctcgaaaaaatcaaaactgccaaagaagaactggagcaatcgaaactcgagcttgagcgcgcgcaaagagaaggtgattttggaaaggcctcgatgctccgttacagtaaaattccagaactcgagcaaaaggttagcgccacggctcagagggtgaaagagggagaatcagaaactactaccaatcttttgcacgaatcggtcacaagcgacgacattgcttgggtagtatccaagatgacgggcgtcccggttcaaagtctcatgaagggcgaaaaagacaagcttctatatatggaggagtccataaagtcccgcgtcattggtcaggacgaggcaatacattccgttgctgatgctgtacggctccaaagagcgggattgactaacgaaaaacggcctatagctagttttatgtttctcgggcctaccggcactggtaaaacggagttaacaaaatcacttgcggaattcttatttaacgacgagaatgcagtggtacgatttgacatgtcagagtttcaggagcgacactccttatcaagattgatcggcgcgcctccatcgtatgtggggttcgaagaaggcggggagctcacagaggccgtccgtcgcaagccttatgcggtcgtattattcgatgaattcgaaaaagcccaccgcgatattagtaaacttatgctacagatcctggatgaggggaatttgaccgattcgcagggtcacaagatagacttcaagaacacgattataatcatgacttccaacttaggccaagatttgctgctcgcagacaccgagctggaaaatgtcggagggaaagtctcggagaaaactaagaatgaggttatccaggtaatgaagcagaactatccgcctgaattcatcaatagactcgatgatgtcttagtattcaaccggttgtcgcgtgagtccctaaggaaaatcgtagacatccgactaagtgaggtacaggacagattggtggatagacgtattgaactgaagttgacggacgcagctaaagagtggttaacggagaaaggctatgacccattatacggagccagaccgctaaatcgtgttattaaaaagcaattattaaatcccttatccattcgactgatacagggagagattacaaataactccacggtaaaggtggacttagtggacggtgatttgcaaattacctcagaaaaaaatgaggcagaggcggaaaccgtaagaaaagaagacggagatgagcccgcggagtatgagataattaaagattga

SEQ ID NO: 4140 - DNA, 360 bp, Artificial Sequence
  Optimized genes for Pichia pastoris
atgccgaagaaacgtgcatccaacgggagaaataagaagggacgaggacacgtcaaattcgttcgatgtttgaactgcgctcgatgcgttcctaaagataaagctataaagcgggtcaccataagaaatatggtggaggcagcagcggtcagggatttatcggaggcatccgtttatgaggaatatgccttaccaaaactgtataataaattgcactattgcgtatcctgcgcaatacatacgcgtatcgtccgagtgaggagtcgatcggaccgcagaatacgcgcgccaccccagcgacaaaggttctccaacgaccgtcgggtaaaccccgcagaggcggcaaaaaaagccctttga

SEQ ID NO: 4141 - DNA, 366 bp, Artificial Sequence
  Optimized genes for Pichia pastoris
atgtttcgcacagcggcatcatcaatagggcggcgcggattcacgacggtgaagggcgacccggctaaagcccaggcctttaaaaaacacttagacgatgtgtaccaccactcgaagggtacaactgccctttggaaaaagatctcttacttcgttgctttaccggctatcgccctcacggcagttaatacctatttcgttgaagctgaacacgcagagcaccgagcgcataacagacacctcagtgacgaggaatggccaaaggcttacccttatcagaatgtacggcgggttgacttcttctggggggacggtgacaagaccttattttggaaccccgacgtgaataggcacgtaaaggaatag

SEQ ID NO: 4142 - DNA, 597 bp, Artificial Sequence
  Optimized genes for Pichia pastoris
atgggactgctagacttagagcaacagctagccttctatcgggcgtatcactttaataaggtaaatgttgctatccatctcgtatttgtacctaccatacttttctctacagtgggcttcctctcagctataccgttaaatcagatcactccctttgacttatctggagtaccgttctttggtaaactgtacaatttgggtgcgttcctaatagcaagctttagtatttattatatcttactagatcgcctgggattggtgctaacgccccttctattgcttattagttattctatctcaacgttgtatgatttctacgacaaaagtgaggtagtaaaggggtccctagtattatttggcatcggctgggcagttcagtttgtcggtcatgcactttttgagcgtcgcgctcctgctttattcgacaacttggtccaagcgctcgtccttgcgccctatttcgttgcatttgaggtagtgtttgcattaggctttcgcaaagacttacagaaaaaaatgaacaatcacgctgggaaacttatgcttgaatttcggaccagagagaagggccaccccgtcgttgaaaaaaccgactga

SEQ ID NO: 4143 - DNA, 636 bp, Artificial Sequence
  Optimized genes for Pichia pastoris
atgtcattcagcgactttagtaaggttgaaaccattagtgagttgaacgaccttctcgcagataaatcgtacattgatggaacatctcccactcaaatcgacgtcgtagtgtataaagcgttccaaaagcaagccccgaatttcgcgaggtggttcaaccacatcgcgtcctttacggatgagttcgatacattgcccgaaggcaacgctccggcggcggccgtggcggcggaacttgctgaagaggaggaagatgtcgatttcttcggatcggacgacgaggaagaagacgaggcagcagagaagctcaaacaggagagattagccgcatacgccgcgaaaaaagctgcgaaagggcccggtcccgctgctaagagcctggtcacactcgacgtaaagccctgggatgatgaaactaacatgcaagatttactggataacgtaaaagcaataaagtgggatgggctggtttggggcgcgcataccttcgtgcccgttggtttcggtatcaaaaagctacagatcaacctcgttgtcgaagacgaaaaggtaagtttagctgatcttcagcaactcatagaggaagatgaagatcatgtgcagtccaccgacattgctgcgatgtccaaactctga

SEQ ID NO: 4144 - DNA, 399 bp, Artificial Sequence
  Optimized genes for Pichia pastoris
atggcgcctaaagccgaaaagaagccagctagcaaagctcccgcagaaaagaagccgacagcggggaagaaaacctcgagttcgtctgagcctaaaaaacgatctaaggttcgcaaagagtcatatgccagctatatttataaagttctaaagcagacccacccggatacgggaattagccagaaagcgatgtcgatcatgaattccttcgtaaacgacatattcgagcgaattgcatccgaagcatcgaagttagcctcctataacaaaaaatcgacaatctcggcccgtgagatccaaacggctgttcgcttaatcctgcctggtgagctctctaaacacgccgtgtcggaggggactcgtgcggtgacgaaatacacgtcttccacgcaagcataa

SEQ ID NO: 4145 - DNA, 393 bp, Artificial Sequence
  Optimized genes for Pichia pastoris
atgagcggcggtaaggggaaagcaagttcagctgagaaggctagcacgtccagaagtagcaaggctgggttaacgttcccagtcgggcgagttcaccgtcttcttcgacgaggcaactatgcccagagaatagggtcaggggcacccgtgtatctgactgcggtcttagagtaccttgccgcggagatccttgagcttgctggtaacgcagctagggacaataaaaagtctagaatcatcccaagacaccttcagctggctatccgtaatgacgaggagttgaataagcttttggggcacgtgacaatagcacagggtggagtcctccctaacattcagtcggaactacttcctaaaaaaagtgccaaagcaaaagcctctcaagaattgtaa

SEQ ID NO: 4146 - DNA, 1002 bp, Artificial Sequence
  Optimized genes for Pichia pastoris
atggcaatcactgtaggaattaacggattcggaagaatcggacgcctggtactacgggtggcgttgtcgagggcggatataaaggtcgtggccataaatgatccattcattgctccggaatatgccgcttacatgttcaaatatgattctacacacaaagcatacaagggggaggtcagcgcttcaggcaacaagattaatatagacggcaatgagattacggtcttccaggagagagatccggtgaatattccctggggcaaagccggagtggactacgtaattgaatccacaggcgtctttacgacactagagggagcccaaaagcacattgatgcaggagcgaagaaagtggtgattaccgctcccagtaaggacgcacctatgttcgtagttggagtaaatgaagagaagtatacttcagacctaaacatagtttcgaacgcaagttgcactacgaactgcctagctccgctggcgaaggtagtgaatgatacgttcgggatcgaatcgggtttgatgacaactgtgcatagtatgactgcgacacaaaagaccgtagacgggccaagtcataaagattggaggggcgggcggactgccagcgggaacatcataccaagctcaacaggtgcggcaaaggcggtaggtaaagtgatccctgagcttaatggaaaactaacggggcttgcgtttcgggtaccgacagtggatgtatcggtcgtagacttaaccgttaacctgaagaaggaaaccacttacgaggaaatcaagagtgttatcaaagccgcttccgaggggaagctaaagggtgtgttgggatacacagaggacgccgtagtaagttcggacttcttaggggatgagaggagctcgatttttgatgcttctgctgggattcaacttactccgagctttgtgaaactaatctcctggtatgataatgaatacgggtacagcacaagggtagttgacttacttcaacatgtcgctaaagcctga

SEQ ID NO: 4147 - DNA, 1245 bp, Artificial Sequence
  Optimized genes for Pichia pastoris
atgaacttgtatctcatcactctcttgttcgcctcactttgtagtgcgattacgcttccaaaacgcgacatcatttgggattattcctccgaaaagattatgggcgtgaatttggggggctggttggtcctggaaccgtacattacccccagcctcttcgaagcatttggagacgacgtgcctgtggatgaataccgttataccgagcggctcgggaagtcactggctctggatcgtctccagcaacactggtcaaccttctatgatgagaaagatttccaggatattgcggcgtacggcttaaattttgtgcgtatccctataggttattgggcttttcaactattagatgatgacccatatgtccagggtcaagaggagtatttggataaagcacttgagtggagtcggaaacatggtcttaaagtctggatcgatttacacggggcccccggtagtcaaaacggtttcgacaactcaggaaagagggattcctgggacttccagaacggtaacaatgtacaggtaacactcgacgtcctcaagtatataagcaaaaagtatggcactacggattattatgacgtggtcataggcatacaattacttaacgagcctttggggcccatcttagatatggataatctacgtcaattctatgctgacggttatgacttggtgcgtgatgtcggaaacaactttgtcgtgatccatgatgcattttatcaggcgccagagtattggggggacgactttacatccgccgaagggtactggaacgtggtacttgaccaccatcattatcaggtatttgacgccgacgagctacagcgatctattgacgaacatatcgaggccgcctgcgattgggggcgggatgcaaacaaggaatatcattggaacctgtgtggagaatggtcggccgcactcactgattgcactccatggctcaacggggtaggtaagggtactcggtatgagggacagcttgacaactcgccctggataggaagttgcgagaattcccaggacccgagcaagttaagtagtgagcgtatttgtgagtataggcgttatgtagaagcacagttggatgccttcctacatggtaagtctgccgggttcattttctggtgttttaagacggaagcaagtctagaatgggactttaaaagactggtgaacgctgggattatgcctcaacctctagatgataggcagtacccgaaccaatgcggattctga

SEQ ID NO: 4148 - DNA, 1053 bp, Artificial Sequence
  Optimized genes for Pichia pastoris
atgagtccgacaatccctaccactcagaaagctgtaatcttcgagactaacggcgggccgcttgagtacaaagatatcccggtgcctaagccaaaatcgaacgaattactaataaatgtaaagtactcgggagtttgtcacacagatcttcatgcttggaagggcgattggcctttggacaacaagctgcctttggtgggaggacacgagggggcgggtgtagtggtcgcatatggagagaacgttacgggctgggaaattggcgattacgctggaattaagtggcttaatggctcatgcttgaattgcgaatattgcatccaaggcgcggagtcaagttgcgccaaggctgatttgtctggttttactcacgacgggtcgttccagcaatatgcgacggcagacgccacccaagcggcgcgtatcccgaaagaagctgaccttgcggaggttgcaccgattttgtgtgccggtatcacggtatataaagcgctcaagacagccgacttacggatagggcaatgggtcgcaatatccggagccgggggagggcttggcagcctagccgtacagtacgctaaagcgcttgggctccgcgtcttaggtatagatgggggggccgacaaaggagaattcgtgaagtcgcttggagccgaagtcttcgtggatttcacgaagacaaaggacgtcgttgcagaagtccaaaagttgacaaatggcggaccacacggtgtcattaatgtttctgtcagtccccatgcgataaatcagagtgttcaatatgttcggacgttaggaaaagtggtactggtagggctcccctctggtgctgtggttaattcagacgtattctggcacgtcttgaagagtatagaaataaagggctcatacgtgggtaatcgggaagatagcgctgaagcaatcgacctctttaccaggggtctcgtcaaggcaccaatcaagattataggtctctcggagcttgcaaaagtatacgaacagatggaggctggtgctattataggcagatatgtagtcgatacttctaaataa

SEQ ID NO: 4149 - DNA, 435 bp, Artificial Sequence
  Optimized genes for Pichia pastoris
atggctagcaaaactgaaaatgtgactctaggacctcaggtccgcgatggaagtcaagtattcggggtcgcacgtatctttgcaagcttcaacgacactttcgtccacgtcacggacctcagtggtaaggagacaatcgcacgcgtcacgggaggtatgaaggtgaaagccgatcgtgacgaaagcagtccgtatgcagctatgctcgccgcacaggatgtcgccgctaagtgcaaagaggtcgggatcactgcagtacacgtgaagttgagggcaaccggcggtacttccactaaaactccaggtcctggagggcaaagcgcattgcgggcccttgcacggtctgggcttcgaatagggaggatagaagacgttaccccggtacccagtgacagtacacggagaaaaggaggcaggcggggccgccgacgctag

SEQ ID NO: 4150 - DNA, 156 bp, Artificial Sequence
  Optimized genes for Pichia pastoris
atgccttcactaaaaacattcaagacaaaacaaaagcttggcaaagcacagaagcagaacagaccgctaccacaatgggtcagactccgaacgaacaataagaaccgatacaacgcaaagaggcgtcattggaagcgtaccaagctcggtatttaa

SEQ ID NO: 4151 - DNA, 387 bp, Artificial Sequence
  Optimized genes for Pichia pastoris
atgcagatctttgtcaagaccctcacaggaaaaactataactttagaagtagagtcctcggatacaattgacaacgtcaaatccaagatccaggataaggaaggcatcccgccagaccaacaacgcttgatattcgcgggtaagcagttggaagatgggagaacgttgtccgactataatatacaaaaggagagcacattgcatctggtcctacggctcagaggtggcattattgagccgagtctaaaggttctcgcttctaagtacaactgcgataagtcagtgtgtaggaaatgctacgcaaggcttccccctcgagcaacgaattgtcggaagagaaagtgtggccatagtaaccaacttaggcctaagaaaaagttaaaatga

SEQ ID NO: 4152 - DNA, 1647 bp, Artificial Sequence
  Optimized genes for Pichia pastoris
atgtcaaaggagtctggtaaggtcctacaggtaaattacagtgactctgaaaccagtaatggcgaggatcaatatgtgcacaagataaaacccgtcgaggacgaggacgatacctctatgatgatgagctttgacaaccacaaacccacgataacgatcattatcctaaccgttatggcctccttttcagggttcatgttcggatttgacacaggttacatctcgtctgcattagtatcaatagggactgatttggacaataaggtactgacctatggcgagaaggagttgatcacatcggcgacttccttgggagctttactaagcgccataagtgcaggtttgctcgctgacataataggaaggaagcctgttattatgggcagcaacctactgttcgtcgtggggtctgtgattcagtgcgctgctaataccgtttggactatgattggcgggcgctttgtcatggggttcggtgtggggatcggtagcctaattgctcccctctacattggcgagatggccccttcgcgcttccgcgggcgccttgtgatcattaacgtaattgcgataacgggagggcaactcgtggcgtatgcgataggagccggcttgactcacgtgcataacggttggaggatcctggtaggtctctcaatcatccccccggtaatacagctttttgtgttctttttcttacccgaaacaccgcgatttctcatcatgaccaacaaattagaaaaagcagctaaagtaattggcaaaacacataatgaatccgatgaggaactaattcaaactaaaatacttgagattcagtcagcaaacgcaattatccccgggtccaacccatttcaaaaaacgtggaacgccataaaggagatacaccgagtccccagtaatttccgcgcactggtaattggttgcggactccaggggatacaacaatttactggttttaatagcctgatgtatttttcagcaacagtcttcgagacgattgggttcaaaaatagcaccgctgttagcctaattgtagccggtactaatttcatcttcacgtcgatcgccttctttgttattgacagggtagggcgccgtcgtattttgctgatcggtgtgactgggatgatactatctctggtgatgtgtgcggtcgcatttcatttcttagatatccatttctctggtcacaatgcaattgtcgaaacgaatggcatcagcggcacgggtgtggcgataatcgtaggaatgatattatatgttgcgtcttacgccctcggtattggaaacgtaccctggcaacagtctgagctgttcccgcagtctgtaagaggcgtaggtagcgcttattgcacagccgtaaactggagtggctccttagtcatcgcctctacgttcttgaccatgttagagaacatcacccccactggaaccttttcatttttcgctggactaagctttgtcagtctgattttcgtcttcttctgctaccccgaacttagtggcctaaaattggaggagacgcaggagattctaaccggaggttttaacatcaaggcttcacttaaattagcgaagcaacgcagaaacaaacaattagaagacccggataaaatagttcataaagttgtagaccaggtgtaa

SEQ ID NO: 4153 - DNA, 531 bp, Artificial Sequence
  Optimized genes for Pichia pastoris
atgttacggcgttacttttcatccaatagcgcacgaatggtgcaggtcggacagtctttgccaaagactacattattcgtcaaggatccgagcgatcaattcgaatcaggcagtatagagcccaactctgttatagtcacagtgcctgcagccttctcacctacttgcagcgacactcatgtaccgggctatctgacgcggcttaaggacttgaaaagtaagaacataaatcatctgtatgtcgtgtcggttaatgaccctttcgttacgaatgcttggaagaagaccctcttaaagagcttttctattgataaaaccgaggttccagtgactttcctcgctgacccgaaaggcgattttatacatgggctagatctggatttcgattccgcagctgtctttggtaacaataggtccaagcgtagtgccctgataatcggtagtgacggaaaggttgcaaaggacttcgttgaaccggacaatacaggcctaaaggtaagcgccgttgattcagtattgaaggctttataa

SEQ ID NO: 4154 - DNA, 504 bp, Artificial Sequence
  Optimized genes for Pichia pastoris
atgatcatttataaggatatcatatctggagatgagttactatccgacgcttacgatgtaaaggaagtaggtggtgtggtctatgaggcagattgtcagatggtcacggtgggctcgggcgacgtggacatcggtgctaatccttctgctgaagaaggtggggaggacctagaggacggggcacaaaccgtcaataatgttgtgtattcttttaggttagcagagacgcaattcgacaaaaagagtttcatggtgtacatcaagggatacatgaaaagaataagggcacatctgactgaaaatgctccggatcaggtagaggcgtttgaaaaaggggcgagcgcatacgctaaaaaaattctctccagttttggagattgggatttttatactggtgagtccatggatcccgacggtatgatcgtgttgctgaactatcgggaggacggagtgacgccgtatgtgagcatttggaaacatggggtcaaagaagaaaaaatctag

SEQ ID NO: 4155 - DNA, 837 bp, Artificial Sequence
  Optimized genes for Pichia pastoris
atgttcactcggagcgttagaaactctttcgttagggctggaccaattaggttggggcccgttgtctcgaagagattatactctcaagcgcagaacggaggtataaaccataaacgcatactcattggccttggccttctagctatcggaaccaccctatatggaacgacgaatccgaccaaaacgcccatagcgttcgttgagccagccacggagcgtgcttttaaagacggtgacgtaagtgttatatttgtattgggggggcctggcgcagggaagggaacccaatgtgccaagcttgtgagtaactacggctttgtacacctaagtgccggcgatcttctgcgtgccgagcagaagagggaggggtctaagtatggggaaatgatctctcagtacataagagatggacttatagtaccccaagaggttaccatagccctgctagagcaggcaatgaaggagaattttgagaagggtaagacccgatttctgattgatggattcccgcggaaaatggatcaagcaaaaaccttcgaggagaaagtggcaaagtccaaagtgactctattttttgattgccccgaaagcgtacttctagagcgcctactcaagcgtggacaaacttctggaagagaagatgataatgctgaatccattaagaagcgtttcaaaacatttgtcgagacctctatgcccgttgtcgactacttcgggaagcaaggaagggtgctcaaagtatcctgtgatcatcctgtggaccaagtatattcgcaagtagtgtcggttctaaaggagaagggcatattcgcagataatgaaacggaaaataaatga

SEQ ID NO: 4156 - DNA, 468 bp, Artificial Sequence
  Optimized genes for Pichia pastoris
atggcaacagagttgattgtgcagagcgaaaaagctttccagaaacagccccacattttcaccaatcccaaagcgaaggccaataaaagaacgaaaagatggcataaagatgtcggactaggttttaagaccccaaaaagtgcaattgaaggtagttacatcgacaagaaatgtccattcacaggcacagtctcaatacgcggaaaaatcttaaccggtacagtaatttccacaaaaatgcatagaactatcatcattagacgcgattatctgcactacgttccgaagtataatcggtacgaaaagaggcataagaatgtggcagctcatgtatctcccgcgtttcgggtcaatgaaggcgatctcgttacggtcgggcagtgtaggccgctttcgaaaacagttcggtttaacgttttaaaagtcacacctgcggttggaggcaataaaaaattctcgaagttctga

SEQ ID NO: 4157 - DNA, 1026 bp, Artificial Sequence
  Optimized genes for Pichia pastoris
atgtctcattatacatatcttggtgatagtgggttgcagatctcaagagtgatcgtcggatgtatgagttttggtagtaaaaaatggaacgaatgggttatcgaagatgaggataagatatttgagatcctaaagcattgttatgacaagggaatacgtaccttcgataccgctgatagttattctaacggggagtccgaacgattactgggtaagtttctaaaagtatacaacattcccagggagagcgtagtgatcttcagtaaggtcttcttcccgctgggtgacaacgaaaaaggctttaactacactacgcgggctcaatttccgcaacatgagcttataaaccgtcaagggctctctcgtaagcacatcatagacggcgttcgttcaagtgtggaaaggctgggtacgtacatcgatctcttacaaatacaccgcctggaccccaacgtgccacccaaagaaattatgcgggctctaaataatttggttgaaagcaatcaggtcaggtatttaggtgcatccacaatgaaaacttggcaattcgtaaatctccagaacatcgccgaacagaatggctggcataagttcatatccatgcaaaactactacaatctgttatatcgcgaggaggagagagagatgaatgactactgtaaacacaatggcgtggggttaataccgtggtcaccaaacgcgcgcggaattctcacgcgtcctctcaaaactttgactacacgagctacaactgacgcagcgattaaaatggtgggtctcgattccctgtcgcccgaatcagaagaaatcattaaccgagtagaaaaattggcctcaaaaaaaaatgtgagcatggctgtcattagcacggcttgggtattacataagggctgcaatcctataattgggttctcaaagccaagtcgtgtagatgaggctctcgaagccctagatttggaactactgcctgaggatatacaatttcttgaggaaccctatcgggcaaacaatgatttatttgggtag

SEQ ID NO: 4158 - DNA, 5637 bp, Artificial Sequence
  Optimized genes for Pichia pastoris
atgtcttataatgacgacaaatattataaccaggggtacccttccgaggggtaccatccatctgaagaagctttacaaagtcaaggatactatgatcaggggcaaggacagcaaccgcatggattaaaccagggcggccttccgccccacgaatattaccaatcctatgaccaacaattcgatggttaccaccaagagtacaccagcgatccgaatctcgtcggccaccaaggttactatgagcagccacccagaacagctcaggatccggaagcgttcagcgattttagctatggtcccggtaatggcgctgggaccccctatgacggttacggagcacaatacacgcccagtcaaatttcttatggtgaccccagatcatcaaatacctccacccctgtttacggtgcggggccatatgaccagagcggtatggttgcgttgcctacggatccttatcccgcatggacagcggataaccaggccccagtatccattgagcagattgaagacgttttcatcgacctcacgaataagtttggatttcaaagggattctatgagaaatatgttcgactattttatggtattattggactccaggtcctctaggatgagccctgcacaagctcttttatcgcttcacgcggactacataggaggggatcacgcaaattacaaaaagtggtacttcgctgcgcagttggacctagatgatgaagtgggatttaggaatatgaatcttggcaaactctccagaaaagcgcgtaaggctaagaaaaaatccaagaaggcccgaaaagtcgttgaagagcacgccgacgacacggagcgcaccttgaccgaacttgaaggtgatagctcactagaggcagcagactaccgctggaacgcacgaatgaacgcgtatgtacctctggatcgagtgcgtcacatagcactatacctcttactgtggggcgaagccaaccaggtacgtttcacgcccgaatgcctctgctttatctataagtgcgcctccgattacttggaatctgacgcatgccagcagagggtagagcccgtcccggaaggtgactatctcaatcggataatcacgcccttgtaccgatttatacgcagtcaggtttatgaagtcgacaatgggcggtacgtgaaacgcgagaaagatcataacaaagtagtcggctacgatgacgtcaaccagcttttctggtatccggaaggcatcgctaagatcgtgttcgaagacggttcacgcctcgtagacgtgccttcagaggagcgctacatccgtctcggtgaagttctatgggaaaatgtgttcttcaagacttacaaagaaattcgatcgtggttgcatttcatcactaacttcaatagaatctggatcatccatgtgtccctattctggatgtacgcagcttataacagtcccactttatatactaagcactacattcagacacaaaacaaccagccgctggcgtcgtcccgctgggccgctgctgccctaggcggtacggtagcttgtgctattcaaattgcagcgacaatatgcgagtggcttttcgttcctcgcaagtgggccggtgcgcagcatctatctcgccggttaatttttctcacattgatactggcatgcaatctggcccccgtagtatttgtttttgcttgggcgggtctagagacttattcgcaagctgcatatattgtgagcattgtggttttcttcgtagctgtcgcaactatagtcttcttcagtgtaatgcccctgggcggactgtttacctcgtatatgaataaacggtcccgccgttacgtagcgtctcaaacattcacggcgtccttcgctcaactcaagggcttggacatgtggatgtcttacctcctgtgggtagtagtgttcacagccaaaacattggagtcatactttttccttatcctgtcgttgcgagacccgataagaaatctgtctattatgaccatgaatagatgtgtgggcgaacgatggtttggcgacactctctgccgggaacaggcacggattgtcctagggttaatgtatgtaacggacctgtttcttttttttcttgacacatacatgtggtacattctctgcaattgcgttttttcagttggccgcagcttttatctggggatttcgatccttactccctggcgcaatatttttacaaggttgccgaaacgtatctactcgaaagttctggcgactacggacatggaaataaagtataagcccaaagtgctgatatcacaggtttggaatgccatagtgatatctatgtatagagagcatcttctcgctattgatcacgtacagaaacttttataccaccaggtaccgagcgaaattgagggcaaaaggactttacgggcacctaccttcttcgtttcacaagatgacaataatttcgatacggaattcttcccacgcgatagtgaggcagaaaggaggataagcttttttgcgcagagtttagctacgcccataccggaaccgctgcccgttgataacatgcctaccttcacagtttttaccccccactactcagagaaaatactcttatccttaagagaaataatccgggaggacgatcagtttagccgagtcacgctattagagtaccttaaacagctacacccaatagaatgggactgttttgtcaaggataccaagatccttgcagaggaaacgagtggtttcgacaatgataatcaagaaaagaatggaaacaacttaaagagtcagatcgacgatctacctttttactgcattgggttcaagtcggcggcacccgagtacacgctgcgtacacgtatttgggcaagccttcgttcacagacattatatcggaccgtatcgggatttatgaattatgcccgggctatcaagctcctgtaccgagtcgaaaatcccgagattgtacaaatgttcggttcgaatgccgagaatcttgaaaaagaattagagcgcatggcccgccgcaagtttaagttcgtcgtggccatgcagcgtctcagcaagttcaagccagaggagcttgagaacgcggagtttctgctacgagcttatccagacctgcagatcgcgtatctcgacgaggaaccacccttaaatgagggggaggaaccaaggctatactctgctttaatcgatgggcactgcgagatcatggagaacggtagacgccgccccaaatttcgggtgcaactgtccgggaaccctatccttggcgatggtaaaagtgataatcaaaatcactccatcattttcactcggggagaatatattcagcttatagacgcgaatcaagacaattacttggaggagtgcttgaagatacgatccgtgctcgcagaattcgaggaattgaacatagatcacgtcaacccttatacaccaggcttaaaatcagagtttgatggagtgaagcatccggtcgccatagtaggggcgcgtgagtatatcttcagtgtgaacagcggggtgttaggtgatgtagctgcgggtaaagaacagaccttcgggacactatttgctagaacgcttgctcaaatcgggggaaaactacattacggtcatccagacttcctcaacaacatttacatgactacgaggggcggggtgtcgaaagcacagaaaggtctgcatctaaatgaggacatctacgccggtatgacggcaatgtgtaggggtggccggataaagcactgtgaatattaccaatgtggtaaaggccgtgatttaggcttcggtagtatcttaaatttcacgacgaagattggtgcaggtatgggagaacagatgctatcgcgtgagtattattatctagggacccagttaccccttgatcgttttttaagtttttactatgcccatcctggattccacattaataacttattcatacaattatcgcttcagatgtttatgctaacactagtcaacttgaacagtttggcccacgaaagcataatatgtcaatataaccggaacataccaatcacggacatcatgtatcctgttggctgttataacctgatgcccaccatagactggattcgtcgatacaccctcagtatttttattgtgtttttcatttcgtttattcccctcgctgtccaagagctaatcgaacgaggtatgtggaaagccgctcaacgcttttgccggcattttatcagtctatcgcctatgttcgaagtgttcgtggcccagatttatagttcctcattagtcaacgatttaaccgtaggtggagcccgttatatcagcacgggacggggttttgctacggcgcggattccgttctccgtgctgtattcgcgattcgccgactcgagtatttacatgggggcccgctcgatgctacttttgctgtttggcactgtagctcactggcagccagcactgttgtggttctgggcatcgctaagcgctctgatgttttcaccatttatattcaacccccatcaattcgcgtggcaagattattttattgactacagagacttcatacggtggctgagcagaggtaacacgcgatggcacaggaattcgtggatcggttacgtacgtctatcgcgttcaaggattaccggtttcaagaggaagacgataaacgatgagtcggagaaagccgcaggggacgcagcgcgggcccaccgctcaaacatcctcgtcgcggactttataccatccgctatatatacggcagggtgtttcacagcgtatactttcatgaatgctcagaacggtgtggcgaatgctactgtagttaactcggttctgcgcatcgtgatcgtttcaatcgctcctattgtcgtggatctggcagtcctggggttctgcgctgggctcgcgtgctgcgcgggacctatgttagggttgtgttgcaaaaagacaggagcggtcatggctggcgtggctcatggcatcgcagtggtaatacacatcatagcgttcattggcctttgggtgttagaagggtttaattttacgaagactcttatggggctcgcagcaatgatctatatccaacggctgatatttaagttaatgacattgactatgctgacacgcgagtttaagaacgatcactctaatacctccttctggacaggaaaatggtatggtagtggtctagggtggatggcctggactcagccggcccgtgagttcgccgcgaaggtcatagagatgtccgagttcgcgggagatttcgtgctcgggcatatacttttgttttgtcagttccctctcctttgcgtgccgctaatcgaccgctggcactcgatgatgctgttctggctcaaaccctccaggcagattcgtcctccaatttatagccttaaacaggccaggttacggaaacgtatggtacgaaattacttgacactatacttcctagtttttgcgatttttgtggcgattatagctgggccagctgctgcggctggacaggttaacgtagaagaattaaccgagcaccttcctgaattcgctgaaggacttatccaaccccgcagacaagataataatgataccggaaataacaatacctgggggtggacctatacgcccagcacttcatcttggagcaccaaagcttag

SEQ ID NO: 4159 - DNA, 1542 bp, Artificial Sequence
  Optimized genes for Pichia pastoris
atgatccgctctacattactccggagaagtatagtcacaccgtgtagatataaatcgactaaggtaaactttcatagacctgacggaccaggctctaaggacgccgccgagcaggcagacgctaccgcgaccatacttgcggatagcctcgattttcagaaacgcattaggcctagtgaatcggcgcctaacaaactgacgtggctagatgcattgaacgagaagaagaggcaactaagtgagggcaaaacaatttcctcttttgcctaccaaagtacaaaaacgacagctgttggtgagaagacgagatccgaatcattcagttatctaactttgccgtttaaagatgatgtttggcttcgtgatagttacatcaatgcagccgggcgccttcgcgtcggacagctctttcaggatctggacgcactcgcagggaggatcgcgtaccgacactgtgcgcctgccgaacccgtgaacgttacagctagcgtcgatcgaatatatatagttaagaaggtcgatgatattgagaactacaatttcgtgttaactggtgtagttacctggacggggcggtcatcaatggaaatatcggttaaaggttacgcgttccctggtgattaccccagtgaaatcaaggagacgaatcttagtgatgatgccgtattcttgaaggctgatttcacgttcgtggcaagaaaccccgagacccataaatcatttcccataaaccaccttctcccaaccaacgagcgggagtggttggatttccgtagggccgagtcacataacgcgcagaaaaagctgcgagcaaaattagagacactagacaaagtgccaccgacccaacaagagtccaatctaatacataacctgtacattgcatcgaaagccgtggctaagttggaccctgaacagagctcgaaactgatattcatgaaagactcacaggtaagctcgactctattcatgcaaccacagtaccgtaatcgacatagttacatgatctttggaggttacctgttgcgtcagacgtttgaactcgcttactgtgctgcaggagctttttcgtgcgcccctcccaggttcgtaagtctggattccactactttcaaggcccccgttccggtgggtgccgttcttttcatgaacgctcgggtatgttacactgaacatattaaggaggaaggggaaggtgactccatacctgtcctagcttcgctcttgaaggcgtatgaactcccaccagcaaatcaaatttcacacgattcatccgaattcctatcacgccctggcacgataatacaagtgaaggttgataccaaaattcgcaatttggactccgtggaagcaattgagtccgggagttttatctattcttttttcgtcccccgtgacactgagggggtgcgcgataagcccggctattgtagtgtcgtcccccaaacgtacgaagagatgatgctttatatagaagggagaagacgcgcattcgatacggccgaatatgcaaaagcgctacatgaggctaagaaggcttga

SEQ ID NO: 4160 - DNA, 450 bp, Artificial Sequence
  Optimized genes for Pichia pastoris
atgcccactaggttttcggccactagaaagcaccgtgggaatgtatctgccggcaaaggcagagtcggtaagcataggaagcatccgggcggccgtggaaaagcgggcggacaacatcatcatcgcacgaacatggacaagtaccatccaggttattttggcaaagttggaatgagacactttcgcctgcaacaggcccgttactggcgccccgtcataaacatacaaaacttgtggtcgctgatcccagaggaaaagagggaagatgcattgaaaaactcttcagcatcttccgcggtggtgatagatacgctggcaaatgggtacggtaaagtgctgggtaaaggtagccttccaaatatccctataatagtcaaggctcggttcgtcagtaaggaagctgaacaatcaattcgggcagttgggggggttgttgaattggttgcctaa

SEQ ID NO: 4161 - DNA, 1209 bp, Artificial Sequence
  Optimized genes for Pichia pastoris
atgagcaaacagacacctagcggaatgacattcataagccttgttgatgattccaatgactcacccgtaacgcagagtacttctgcagataaagacgaaaaacacaccgctgtctcccaagagcagataaatgctgctgggaaaaaacaaaaccaagtcgacgatgaggaggaggaggagcaaaaggaggagtataaacgtagcttagaagagatcgagatcaaagacgccgcatattataaaatgacagatccggtactcttgtatgatataccggcgcaggtgaattcctcagatgaatacattaaatggtcaccgaatatagttcaaacaagaatgctactaaatcatctgcagatacctttcgaagtgcagtggttgacgtatcctcagataaaacccacattacagaagctaggtgtaaaaccgtgggattctgacccggaatacaccttgccggcaataagctacaagggaaccacggtgatggggagatccgagatcgaggaattcgtaaaacaaaatttcgaccctctgagcactccaaatttcacggactattttctggatatcgaagaccgaaagttcaacagagcgatctcaaattattcggaccagatcctcatgggtaaactctccttcccacttttagcattctccgagtctatcgttgtcaaggatgaaaacgacccggagtattttcagcggaccaagaacgagcgttttggggtagattgccaagctttagtgaaggacaaggagaagatacatgagatggttgaggcgatttgcaatgagctccctggattcatggaattgtatgactattctgaggccgagaatgctgatcttctcttcctaaaagtcaacaagtatttaatgggctttcatatcacgcgtgcagacttgataatagcttcctacgttttctggataaagactgcggttaaagccggtatggaggagcatagctttcataattattggtttgatgcgtggtacaaccggatttctaagttattggattccccatttgacggaagtaaggttgagcaagaggcgctggacgacctgaataaacgcatcgaaggctcgcatcaaaatagggtcagggagtcgggcgagcaaatcgatgaaaatgataaaacagagaacgtcaatgagcttactgagccagcctcatccacagttgagcaacccccggcttaa

SEQ ID NO: 4162 - DNA, 450 bp, Artificial Sequence
  Optimized genes for Pichia pastoris
atgtcagacaaactatcggaggcgcaaatatccgagttcaaggaggcattcagtttgtttgaccaagatcaagacgggaaaataaccagtaaggagcttggcatcgtcatgcggagtctagggcaaactcctacggagtccgagctaaatgatttgattcgggaaattgatagcaatacggatgggtctattgattttccagagttcctcaccatgatggcgcggaagatgcgcgattcggattcccaagcagagattttcgaggcttttcgagtcttcgacaaagatggtgacggcaagattgataaaggtgagctgaaacacgtgctcacctctattggtgagaagcttacagaagaagaggtagatgaaatgctaagggaggcggatactaataacgatggcgtaattgatattaaggagtttagtaatttactggtcaacaagtga

SEQ ID NO: 4163 - DNA, 1518 bp, Artificial Sequence
  Optimized genes for Pichia pastoris
atgtccacatccagtaagcttggttggctgtcgaaattagacgtaagtagtacgccagaaaggaatctgaggcggtcgtcgattattgggacgattgggcctaaaacgaatagtccagaggtgctggtcagcctacggcaggcaggtctaaacatcgtccgcatgaatttcagtcacggttcctatgaataccaccagtcagtcgtagacaacgcccggaaaagtgaggaaatttatccgggccgccccctcgcgatagcactggataccaaagggccggaaatccgcactggcacaacaaaaggtgagacggactatgccatcccgatggggcatgaaatgattttcacgacagatctgagcttcgcaaagtccagcgacgataaggtaatgtttatagactataaaaacatcaccaaggttatcgagccgggcaagatcatatatgtcgatgatggagtactatcatttgaggtcttggaagtcgtcgatgaaaatacgcttaaggtaagatctatcaacgccggtgctatttccagccacaagggagtaaatctaccgaacactgatgtggacctccctgccctctcagagaaggataagcaagacctaaggttcggtgtaaagaataaagttaatatggtgtttgcatccttcatcaggtgtgccaatgacattaaagaaattcgccatgttcttggcgaagatggtaaacagattcagatcatagcgaaaatcgagaatcaacagggggtcaataacttcgacgagatcctggaggtaaccgacggggttatggtagctcgtggtgacctcggtattgaaataccagcacctcaggtatttgttgtgcagaaacaattaattgcaaagtgcaacctggcggggaaaccagttatttgtgctactcagatgctggagtcaatgacttataacccgcggcccaccagggcggaagtgagtgacgtgggcaacgcaatccttgacggtgctgactgtgtaatgttgagcggcgaaactgctaaagggaattacccccacgaggctgttgccatgatgcaccatactgctttgatcgccgagtcggcgatcgcatacctccctcactataatgaaatcaaagacctcgcgcgcggcctgatcaatactgtggaaacaatagcaatcgccgccgttagcgcgcacttcgaacagaacgccaaggcaatagtggtattgtcaacgagcgggacatcggcgcgaatgatcagcaaataccggccgaactgtcctattcttatggtcacacggaatgatgaagcggctcgctacagccatttgtaccgaggagtttacccattcatatataaacaggaagtgaatgataactggcagcaagacgtagaggaaagacttcagtacgccatcacggaggccataggcatgggcatcttaaaaaagggggatgcaattgtggccgtccaagggtggacaaaagggcttgggcacaccaacaccatgcgagtggtattcgcctag

SEQ ID NO: 4164 - DNA, 2106 bp, Artificial Sequence
  Optimized genes for Pichia pastoris
atggtatttcaagtgaatgtccccgtcggggaggcccgaaaaggggaaactgcgcctcggcgatactataaggtcaaagatgcggcagttttaaaaccttccgattgtaatcccaagaccgaaacggtatatgactatttagtggaaatgttcgagcgccatgaggataataaagcgatggcctggagagacctagtagacatccatactgagaagaagaaagtgaataaaatgattgacggcgaattgaaaaatatcgagaaagaatggcaatactatgagttgagtgattataagtttataacgtacaaggagttgaagagcataatctttgagtacggacgaggcttggtagagcttggcataaagccaaatcaagaggagagactacacatatacgccagtacttctcacaaatggtttcaaacatatttagctacacaaacgcagaacataccaatagttaccgcgtacgatacgcttggcgaatccggcctcacgcatagcctagtccaaacgggaagcgtggcgatatttacaaataacgatctgttacatacactaattaatccgctaaaaaaagcggtatcggttcggttcatcattcacacagagaaattagactcctccgataagcgctatgggggtaagctctaccaagatgcacaggtagccattgatgagatcaagcgaacacatccggatataaagttcatctcctacgatgagatagtggctctcgggcgcggcagtaaactgaatgcgatcccccctaaggcggatgacttaagttgtattatgtatacaagcggttcaactggcaccccaaagggcgtcgtactgtctcatcgcaatgtacttgcaggaatcgggggcgcaagtaccctagtccccagatctttaataaacggtaaggatcgtatcatcgcattccttcctctagcccacattttcgaactggtttttgaactcatttcactgtggtggggtggttgcttaggttatgccaacgtaaagactcttacagacgcgtccataagaaattgtcaaagcgacttgaaggcctttaaaccgacaataatggttggtgttgctgctgtttgggaatccgtgcggaaaggtattcttgaccaattaaacaaatcgccattcttgctccaaaaggtgttttggggggcatataagtctaaacaggcaatgaagtattgccacatacctggtactagtataattgatgcagtcatatttaggaaggtaaaggctgcgactggaggagaaatcaggttgctattgaatggtggatcgccaatttcagcagacacacagcggttcatcaccaaccttcttgcccccatgctattgggctacggcctgaccgaaacagtagcaaatacatgcataacggacatcgacaactttgaattcgatgtagcaggagctctgacaggggcggtaaccgtaaagctgatagatgttccggaggctggatactttgcaaagaataatcaaggcgaggttttgatacagggtgcatgtgtgacgaaagaatattataagaatgaacaggaaaccgcatcggtctttgattatgaaaaggggtggttctctaccggggatattggcgaatggactagctccgggcagctcaaagttattgaccgaaaaaaaaatttaatcaaaaccctcaatggtgagtatatcgcactcgaaaagatcgagagtgtataccgatccaactcctatatacataacgtttgctgctacgccgaccagaacaaatccaagcctgtagccatcgcggtcccaaatgaaacgactttacgaaagctcgctgtacaattaaagctggcgagtgcagtcgatgaagtggacttggccaaggtagtgcacgatagtaagctgatatcgaaggtgcaccagagcctgttagagacggcaaagcagcagggcttaacaggcatagaactaatccagggcgttgtaatactcgacgaggaatggacaccgcaaaatggatttgtcacgtcggcccagaaattacagcgcaaaaagatcttagaatcggtcaaggatcgcgtcgacgaagtgtaccgacagaatagttag

SEQ ID NO: 4165 - DNA, 774 bp, Artificial Sequence
  Optimized genes for Pichia pastoris
atgagccgtgaggattcggtataccttgctaagttggccgagcaggccgagcgttatgaggagatggttgagaacatgaagacggtagcgtcaagcggcttggaattaagtgttgaagaacgaaaccttttaagtgttgcctataagaacgtcatcggtgcgagacgggcgagctggagaatagtttctagtatcgaacaaaaagaagaggcaaaaggtaaccaatcccaagtaagcttaatccgggagtaccgcagtaagatcgagacggagctagcgaatatctgtgaagatatcttgtctgtgttaagtgagcacctaatccctagtgctaggactggtgaatcgaaggtcttctacttcaagatgaagggggactatcaccggtatctggcggaatttgctgtaggtgataaaagaaaagaggccgccaatttgtctttagaggcctacaaatcagcctccgatgtcgctgtcacagaattgccgcctacgcaccctatcagattgggcctagcattgaatttttcagtgttctattacgagatactcaattcgccggaccgagcatgtcaccttgctaaacaagcttttgatgacgctattgcagagttggaaacactatcggaagagagttataaagactctaccttgatcatgcagctcttgcgcgacaatttgactctctggacctcagatatgtcggaaaccggccaggaggagagttctaattctcaagataagaccgaagccgcgcccaaggacgaagagtag

SEQ ID NO: 4166 - DNA, 2529 bp, Artificial Sequence
  Optimized genes for Pichia pastoris
atggtcaacttcaccgtggaccagatgcgctcattaatggacaaggttaccaacgtcagaaatatgagtgtaatcgctcacgtagatcacggtaagtctacattgactgattctctagtgcagcgggcgggcatcatttccgcggccaaagcgggcgaagcgcgattcaccgatactcgtaaggacgagcaagaacgcggaatcacaataaaatctacagccatatcactgtactctgaaatgggagacgatgatgtcaaagagatcaaacaaaagaccgaggggaattcattcctgataaatcttatcgattcaccgggccacgtggacttttcctccgaagtaaccgccgccctacgtgttacagatggggcattggtcgttgtagactgcgttgaaggggtctgtgttcaaacagaaaccgtgctacgtcaggccctgggtgagaggatcaagcctgtcgtcgtgattaataaagttgaccgggccttgcttgaacttcaagttaccaaagaggatttatatcaaagttttgcgcgtactgttgaaagtgtcaatgttgtaatcgcaacatatacggacaagaccataggggacaaccaggtgtatcctgaacagggtactgtcgcgtttggcagtggattgcatggatgggcgtttactgtacgacagttcgctacaaggtattcaaaaaagtttggggtcgacaggattaagatgatggagcggctttggggtgactcgtatttcaatccgaaaaccaagaaatggacaaataaagacaaagacgctgccggcaaacctctagaaagggctttcaacatgttcgtattagatcctatatttcgtctatttgcagctattatgaactttaagaaggatgagatccccgtcttgctggagaagctcgaaataaatctcaaacgggaagagaaggaactcgaaggtaaagcacttctaaaggtagtaatgcggaagtttttacctgcagcggacgccctgcttgagatgatagtcttacatttgcccagccccgtgaccgcacaagcataccgagccgagacgttgtacgaaggaccctcggatgaccagttttgtatagggatccgggaatgtgaccccaaagcagagcttatggtgtacatttcaaagatggtccccacctccgacaaaggccgattttatgcgtttgggcgggttttcagcggtactgtgaaatcgggacaaaaagtgcgcatccagggcccaaactacgtcccaggtaaaaaggaagacctattcatcaaagcggtgcagcgcaccgttcttatgatgggtcgaactgttgagccgatagacgatgtccccgcgggaaacatcctcgggatcgttggcatcgatcaattcttgttaaaatctggtacgttgaccaccaatgaagctgctcataatatgaaggtcatgaaattcagcgtgagccctgttgtacaggtcgctgtagaggttaaaaacgcgaatgatctgccgaaacttgtagagggtcttaaaagactatcgaaatcggacccgtgtgtcttaacttacatatcggagagcggagagcacattgtagctggaacgggtgaattgcatttggaaatctgtctgcaagatctacaagatgatcacgcgggggtacccctcaagatttcaccccctgtggtgacatatcgggaaacagtcacaaacgagagcagcatgacagccctctcaaaatcacagaataagcataaccggatttacctaaaagcccaacctatcgatgaagaactgtctctagctatagaggagggcaaagtgcatccgagagacgacttcaaggcacgagctagaattatggcagatgaatacggctgggatgttacggacgcacgcaaaatatggtgttttgggcccgatggcacaggtgcaaacttagtggtggatcagtctaaggcggttcaatatctacatgagattaaggattcagtcgttgctgggtttcaattagcaaccaaagagggaccaatcctcggggagaacatgcgcagcgtccgtgttaatatactagacgtgaccctccacgctgacgcaattcatcgcggaggcggtcaggtgatcccaaccatgaagcgcgtaacgtatgctgcgtttttactagcagaacctgctattcaagaaccgatattcttggtggaaatccaatgcccagaaaatgcaatcggcggtatttattccgtcttgaataagaagcggggtcaagtaatatctgaggaacagagaccaggcacccctttgtttactgttaaagcttaccttccggttaacgaatcctttgggtttaccggagagctacggcaagccacagccggccaggccttcccacagatggtattcgatcactgggccaacatgaatggtaatccgctggacccagcgtcaaaagtgggcgaaattgtgttagcagcacggaagcggcaagggatgaaggaaaatgttccaggttatgaagaatattacgacaagctctaa

SEQ ID NO: 4167 - DNA, 1578 bp, Artificial Sequence
  Optimized genes for Pichia pastoris
atgctaagaacaagtccggccacaaaaaaagcactcaagtcccaaatcaacgcattcaatgtagcggctttgcgcttctattcttccttgcctttgcaagtcccgataactttgcctaacggaaaaacgtataatcagccaaccggcctcttcattaacaacgagtttgttccaagcaagcagggcaaaacgtttgccgtattaaatccctctactgaagaggagatcacacacgtgtacgaatctcgtgaggatgacgttgagttagcggtcgcggctgctcaaaaggcatttgatagtacttggagtacacaagatcctgcggaacgaggtaaagttctcaataaacttgccgatttgatagaagaacatagcgagacgctcgcagcaatagaatcattagacaacggcaaagcgattagcagtgcccgaggcgacgtaggacttgtcgtagcctacctaaagtcgtgtgcaggctgggcagacaaggtattcggtagagtggtagaaactggatctagtcattttaattatgtaagacgtgagccgttaggagtttgtgggcaaatcatcccctggaacttccctctactaatgtggtcgtggaaagtcggtcctgccctcgcgacgggcaacacggtcgttcttaagactgcggagtcaacacctctgagcgccctgtacgttagccagctagttaaagaggcgggcattcccgccggggtccataacatagtatcgggatttggtaagattactggagaggcaattgctactcatcccaagataaaaaaggttgcatttactggctcaacagcgacaggcagacacataatgaaggcagcagcggagtccaatctaaaaaaagtcacactagaactggggggtaaatctcccaacatagtttttaacgacgcaaatattaagcaagctgtggctaatatcattctaggtatatattataacagtggagaagtctgctgtgcaggatctagggtttatgtccagtccggcatttatgacgagctattagcggagttcaagacagctgcggagaatgtaaaagtcggtaacccctttgatgaagacacttttcagggtgcgcagacttctcaacaacaactcgagaagatactcggcttcgttgaacggggaaaaaaagacggcgccaccctcattactgggggggggcgactcggtgataaaggctacttcgtccaacccactatctttggagatgttacacccgaaatggagatcgtgaaagaagagatattcggacctgtggtgacgatttcaaagtttgataccattgatgaggtagttgacctggcaaatgactcacaatatggactggcagcgggaatccatagtgatgatattaacaaggtcatagacgtcgctgcgcgcatcaagagtggtactgtctgggtgaatacatacaacgacttccatcaaatggtcccattcggcggatttgggcaaagcgggatcggtcgggagatgggtgtggaggcgctagagaattatacgcaatataaggcgatcagggttaaaattaaccataaaaacgaatag

SEQ ID NO: 4168 - DNA, 876 bp, Artificial Sequence
  Optimized genes for Pichia pastoris
atgtatagaaatctgataatagcgacggcactgacgtgcggtgcttatagcgcgtacgtgccctcagagccatggagcacacttacaccagatgcgtcgctcgaatccgcattaaaggactactctcagacgtttggcatcgcaattaagtctctagacgccgataagattaagagagaagctgtgagccaaattggggatgggcaaatacaagcagcaacgatcacctcatcggagccaaaggtcaccgcgcaggtcgtttcgcagataggcgatgggcaaatccaggctacaacatcgacgtcttctaagtctaaggagacggctcaggtcgtctcacagataggagatgaaactgcccaagtggtaagtcaaatcggggacggtcaaattcaggcgacgaccagcacatcctctgaggtaaagcagactacgggtgttgtcagccagataggggatgggcagattcaagccacgaccgcaaccacgagcgtcgcgtcgcaaattggagatgggcaagtgcaagagagtaagcctacggacacgagtgaagataagggaacatcagacttggtttcctgccttaccgattcatctctcgcattagtactcgaaaagggcgtacttaccgatgcccagggacggatcggggctatagtggccaataggcaatttcagtttgacgggcccccaccacaagccgggactatttatgctggagggtggtcaattactgacgatgcaaagctggctctcggtaattccacaaccttttatcaatgcctctcgggaactttctacaatctatacgacgaaaagattggtgagcagtgtgaaccagtagagcttgacattgttgacctaatagagtgctag

SEQ ID NO: 4169 - DNA, 840 bp, Artificial Sequence
  Optimized genes for Pichia pastoris
atgagtctatcgctagataatatcgttccctcattccgtttagacggatcagtctctatcgtcacgggtgggagcggcgggcttgcgtcggttatcacaaaggccttgctagcccaaggctcagaaattgccgtagttgatctcaacttagagagaaccaaagaagcggcagaacttctgatcgaatggggtaaagaaaatctcgcaaaggcgaacggaggctccgtcccaagagtgacatactgggcttgtaatgtagctgacgcggctaacgtggaggaagtatttacgaatgtgaacaaagagcacggtaaattggcagaatacctggtacattgcgccggctattgcgaaaatttccccgcacacgaatatccagctcgcaacgcggaatcattagtacaagttaatctgctgggctcattgtatgtatctcaatctttcgcccgccccttaatcaaaagtggacacaggaacggcagtatagttctggtcggttctatgagtggtaccattgtgaacgatcctcaaccccaggtagcttataatatgtccaaggcgggggttattcatctcgcgaggtcattggcttgtgaatgggcaccttataacattagggtgaacactctctcgccgggctacattttaacaccgctcacccgcaatgttataagcgggcatactgagatgaaggactcctgggaatcaaaggttcctatgaagcgcttagccgagccgaatgagttcgtcggatctgtgctgtacctgctgtcaaaaacggggtcgtcttacacaaccgggcataacttagtggtcgatggaggctatgaatgctggtag

SEQ ID NO: 4170 - DNA, 1461 bp, Artificial Sequence
  Optimized genes for Pichia pastoris
atgctaaaatttgggcaacgaagatttttgagtacttcgcgaattcttgcgcaggccatcaaacacgacgtggtagtgataggcgggggcccaggcggttacgtagcggcaataaaggccgcacaactagggttagatacggcctgcatagaaaagcgaggtgcgcttgggggaacgtgcctaaacgtcgggtgcattccttcgaaaagcctcctcaacaattcacacctgtaccacacgataaagcacgacactaaagaacgagggatcaatgtggccgatgtccaaattgacatcgggcaattacaaaacgccaaggaaaaaagcgtaaagcagctcactggcggaatagagatgctctttaagaagaacggtgtcaaatactacaaaggctccggcagtttcgtagatgagcacaccatcaacgtagatccggtcgagggtggagacaaggtagagctcaaagctgacaacgtaattatcgctacaggttctgagccctcgccttttccagggatcaccgttgatgaggaaaggatagttacctccacaggagctctagatctgaaagaggttccaaaacgtatggctatcatcggtgggggcattatagggctagaaatggcatcagtctggagccgtgtaggttcagaagtgactatcatcgaatatcgcgattccatcggcgcgggaatggacgcagaggtggctaagagtacacaaaagttccttacgaaacaaggtctgaaattcaagtgtggagcgaaagttaccaagggcgagcgtgtaggagaagtggtcaacattgaaatagagacaacaaaggatggcaagactgaacagtttgaggctgacgtgctcctcgtggcggttggtaggcgtccatatacggaggggttgaacgccgaagcaataggactcgatttcgataatcggggcacgctcgtgattgattctgaataccggactaaacacccgcacatcagggttataggtgatgtaacgttcggacccatgcttgcccataaggcagaagaggaaggaattgctgcggcagaatttattaagaaaggtcatggacatgtaaactacgggaatattccatcggttatgtatacacaccctgaagtggcttgggttggacaaaacgaacaacaactcaaagaggctggaatcaagtacaaagttggaaagttcccgtttatagcaaattctagggctaaaactaatctagacacagaagggtttgtcaaattcctcgccgacgctgagacgcagagagttctgggggtgcacataatcggtcccaatgcaggcgagatgatcgccgaggctggcctcgccttagaatacggcgcttctaccgaggatatcgcaagggtttgtcacgcacatccaacgttatcagaggcgttcaaggaggcagctttaggaacattcgataagaccattaacttctag

SEQ ID NO: 4171 - DNA, 669 bp, Artificial Sequence
  Optimized genes for Pichia pastoris
atggcaagacggccggcccgttgctaccgctactgtaagaataagccgttccccaagagccggtacaatagaggtgttccggatcccaaaataagaatttacgacctcggtagaaaaaaagcggctgttgatgatttcccattgtgtgttcaccttgtttcgaatgaaatagaacaactcagctctgaagccctggaggccgcacgcatttgtgcgaacaaatacattaccacacaaagtggacgcgacagcttccatttgcggattcgggtgcatccgtaccatgtgctccgaattaataaaatgctatcttgcgcaggagcagacagattacagcaaggaatgcgaggtgcgtggggtaagccacacggcctagcggcccgggtgaccatcggtcaaatactaatgtcaatccgaacaaaagattccaataaagcggtggttatagaaggtcttcgtcggtcgcgctacaagttccctggacagcaaaaaattattatttcaaagaaatggggttttacaccgttggatcgggaggattatatcgtcaagcgagcctccggcgaaatacgcgacgacggagcgtatgtcaagttccttactaaaaagggtccgttgcaggaaaatttagagcaatttccagactacaactatgccgaagctaactag

SEQ ID NO: 4172 - DNA, 459 bp, Artificial Sequence
  Optimized genes for Pichia pastoris
atgtcccagaacgaacgcacctttattgcagttaagcccgatggagtccaacggggtctggtaccagagattcttagtcggttctggaataaaggatataaactggtagccatcaagctcacacttgctaacgaggatctattaagggaacattacgccgatctcacgagtaaaccttttttcccatccctattgagctacatgttaagtggaccggtactagcgacggtttgggaaggaaaggacgttgtcaagcagggccgggctctcctgggtgccacgaatccactggcatctgctccagggacgattcgaggcgattttgcggtagacatgggacgtaacattatccatgggtcagattccgtggaatctgccgagaaggagataggcctctggttcaaaaaggaagagttagttgattacaagcctactcttacgtcctggatatacgaataa

SEQ ID NO: 4173 - DNA, 960 bp, Artificial Sequence
  Optimized genes for Pichia pastoris
atgaagtttggacttgggtccttggggctggcggtagcgcttatccctatagcgtctgcattatatcgcgtcgatgactatgagacatatgtgccaactacagtcggtcctcaccccacgggcgccattgaacccgctgaagaccaagtggacataaaagttgagcctacggtttacagtcaacttctagacgagttcgaaaacgtcttgggggaatcagatggcatggtgaaccatgacaatctagcttcgatctggatgagcttctcaatgattgttgtttccgaaattggcgacaagacatttcttatagccgcacttatggcaatgaggtcgcctagatggctcgtgttcgctggcgcttcgagcgctctggtagtcatgacagtgctgtcgtgtatagtgggacacatactcccaacgctattgaccgagaagacaactaaaacactggcatctatactattcgtagtgtttgggatcaagctggctaaagaagggtttgagactccaaaggacgttggtgttgaagaggaactggccgaggtcgaagaggagattgctctctcttctatcaataacaagctagatgacgcggagactgggtccgtctccggttctaataaaaagaaatatcaaacaacgctaagccatctactggaagagacgaaggaattattgtctttcatactgtccccgacgttcctgcaagttttcaccatgacttttctgggcgaatggggtgataggtctcaaatagcaacgatcgctatggctgcatctgcgcagttctactttgtgatagtaggaagcgtgctaggtcacgccctttgtaccggaattgcggttcttggggggaaattgctggctggacatataagtcttagggcagtcaatttggggggttcccttgccttttttatatttgcgttcatctacctttacgaaatttacatgtaa

SEQ ID NO: 4174 - DNA, 1296 bp, Artificial Sequence
  Optimized genes for Pichia pastoris
atgaaaatctctgcgttgaccgcatgcgcggtgaccctggcgggactcgccatcgcagcaccagctccgaagccggaggattgtacaacaaccgttcaaaaacgtcatcagcataaacgggccgtggcctatgattacgtgtacgtgaccgtgactatcaacggtcaaggcgaaaccatctcaccaactgtagtggcggagttagagacagtttcgactccggccacttcctccagcgctgtcgcgacgagtagtgcccccgccactacatcgtccatcccggaaactacttcggctcaagtcacaacgtcatcagttgctgaatcaacatctgcacagttcacctctagtacagaagaagccagcagttctgtcgagcaaacgacgcaaagctcgagtagctcgagcccctcttcgagtagctctagcagttcgagtagcggctcaagctcagggtcaagtagcggcggtatagatggggacctgagctggtactcaggacccgggaataagtttcaagatggcactattaagtgttccgagtttccaagtgggaatggcgtcgtcgcactagatcatttggggttcggagggtggagcggattatatcatccctctgatacttcgaccggtggaatttgcgagccagacacatattgtagttatgcatgtcagagtgggatgagcaagacccagtggccgtcagagcaaccagataatggagtgtctgtgggcggactctactgcgatagcgatgggtatttgtataggagtaaaaaggacactgattacctgtgtgaatggggcatcgacgtagcctacgttgtatctgagatagggaaaaccgctgccatctgtcgaactgactacccaggcacggaaaatatggtgattccgaccgttgtgagtcccgggggggagttaccattgactactgtagaccagtcaagctattacacctggcgcggaatgaagacgtcagctcaatattacgtgaatgatgctggtgtcgattggacgactggttgtacatggggagattatggaacagactacggaaattgggccccactaaactttggggcagggtatgacaacggaatatcttatctctcccttatacccaatccaaataacaaggattcactaaactacaacgtaaagatagtggcatatgatgactctagcgtggtaattggtgagtgtaagtatgaaaatggtagttacaatggtaacggcagtgacggctgcacggtagcggtgaatagtggtaaagcgaaattcgtactgtattaa

SEQ ID NO: 4175 - DNA, 513 bp, Artificial Sequence
  Optimized genes for Pichia pastoris
atgacgcggtatagtgcggtccccgccaatccggaccgatctgcgtccgcccgaggttcgtacctgagagtaagctttaagaacacaagagaaacagcacaggcggttaatgggtggaacttgaagaaggctcaacagtatttggatcaggtactggaccacaagcgagcaatcccgtttcgacgttttaattcaagtatcgggcgtacaggacaaggtaaggagtttgggacggacaaagcgagatggcctgcgaagtcggttaagttcattcaagaccttctgaaaaatgcggagagtaacgcagaatccaaaggtcttgacatagactcattaataatttcccatatacaggtcaaccaagctcctaagttacggcgaagaaccttccgagctcatgggagaataaatgcgtacaatagctctccgtgccatattgagctcatacttagcgagccggatgaggctatagaaaaggcgaaagaggaaccagctcagctaactgaggcgtag

SEQ ID NO: 4176 - DNA, 1131 bp, Artificial Sequence
  Optimized genes for Pichia pastoris
atgtcttctatagcgtttcatacgttcagaggatcgcgtgctaagatggcgacagcattactgttgacaggagcggtcggcgcaggttcatatcattatgagaagaagcgacgtcaatttaacaaccgcaataacaataataacaataataaaaataacaagaatttcgcaaaagcattgtttggtttcagtacgggaacagcggcagccactctgactgatgaatcgaaggtaaaggtcgcgactctctctgatatacactccttcaaagaatatcagcaagtttacaacgatatcgccaaaaagatcgaagatgaagacgacttcgatgttgatgggtcagccggccctaacttagtgcgtcttgcatggcactcggccgggacgtacgacaaatacgataaaaaccctcatactaacgggggctcgtatggaggtaccatgcgattttccaaagagggaggtgacggtgcgaataatgggcttgctaaaggccgtgaattcctcgagccccttcttaagaagtatacttggttatcgcatggtgacctatggacgctagccggcgtggttgctatccaggagatggggggtccgaagattaagtggcgacccggtcgcaaggacttaagtgaggaatatcaggctccaaacggcaaactacccgacgcagcgcaaggtcccgattatgtgagaaagttcttcaatagattagactttaccgacagagagatggttgccttgattggtgctcataccctagggagatgtcacgtcacatcgtccggttacgacggtccgtgggactttgcacccacgatgtttgataatgggttttttacccagctgcaaaagggggtggggtcaggagaaggtcaatggcaccttcgcaaatgggatggccctgaacagtatgaggacaataactctaactctcttatgatgttaccggcagacatggctctcgtacaagatccaaaatttaaaaagatcgtcgatgagtttgcggcctcacaagaggcgtttttcaacgagttcgcaccagccttccagaaattactggagagcggcatccatttccccaaggaatctaaagagctggtattccgtactctggatgagcagagctag

SEQ ID NO: 4177 - DNA, 1533 bp, Artificial Sequence
  Optimized genes for Pichia pastoris
atgagccagccgcccaagtggacaacatcgaacggggcgccggtgtctgacgtattcgccacggaacgcgcgacattcgacaacgcaaatcacgccaataacgcacctaaggtaggcccgctgttactccaggatttccagctcatcgattcgctagcccattttgacagagaacgcataccggaaagagtagtgcacgctaaaggcgcgggggctttcggcgagtttgaagttacagatgatatatccgacgtatgtgcggccaaatttctggacactatagggaaaaagacgaggatattcacacgattctctaccgtagggggtgagaaagggagtgccgattcggctagggatccgagaggtttcagtacaaaattttacacggaagaaggtaatctcgacttggtttataataacacgccgattttttttattagagatccatctaagttcccacacttcatccatacgcaaaaacgtaatcctgcaacaaatcttaaggatgcgaacatgttctgggactatcttgtaaacaaccaggaatcaattcatcaggtcatgtatctcttttcggaccggggtaccccggcatcccttagaaagatgaatggctactcagggcatacctataagtggtataataaaaaaggggaatgggtatacgtgcaggttcacttcaaatcggacttaggcgttgtaaacttcaacaacgaggaagctgggaaactcgcgggtgaagacccagactatcatacaggtgatcttttcaatgctatcgagcgtggggagtatccttcatggacatgctacattcaaactatgacccaagaacaagctgcaaagcaaccgtttagcgtctttgacctaacgaaagtctggccgcacaaagacttccctttaaggcgtttcggaaaattcacacttaacgaaaatcctaaaaattactttgcagaggtcgagcaggctgcgttcagtccatcgcatacaattccgtcaatgcaaccaagcgctgaccccgttctccagagtcgcttatttagctatccagacacacaccgtcaccgattaggagttaattaccagcaaatacctgtcaattgccctgtggcaccagtatttaccccccaaatgagggacgggtccatgactgtcaacggtaatctaggtagcactccaaattacaagtcctcattttgcccattcagcactgaggcgcaaatacaaaccaatagccatacgcccgaagaggttttggcggcacataccgaaaaatttcactggggaggtatcttggattcgaagtcgtatgattttgaacaacccagggcattatggaaggtttttggcaagacgcctggacagcagcgcaatttttgccacaatgtggccgttcacgtagcagcagccaatcatgaaatccaggatagggtattcgagtatttcagcaaggtatatccggagatcggcgatcaaatcagaaaagaggttttgcagctttccccgcggggggattcagcggctcgtttatag

SEQ ID NO: 4178 - DNA, 1257 bp, Artificial Sequence
  Optimized genes for Pichia pastoris
atgcaattcgggaaagtattatttgcgatttccgccctcgcagtaaccgccctgggtgaaacaacctcctccttgtctgcgacactgacgagtactacgagaatttcgatagcgtcgggatgttctcttgaagattttaccgcaactgcacagtcgaatcttgacgagttgtcggattgtgaggctgtgcgaggggacatccacattgccggttcattgggctccgctgctatagctaacgtgaaagccatttatgggtccctcatagttaaaaacgccacatcactggtttctcttactgcggattctctcacaacaatcacagagcaactggcattgtctgagttaactatcctagacaccttaagctttgcgcaactaactagcgtcggttctatctatttcgtaacacttccagccctcgaggaaactggcttccataccggggtgtcagatactgaatcggtctacatcagcgatactgcactcactaacctcgatggaattgtagctaccgacgtggatgtgtttaacgttaataacaatttcaacttggatacagtggactctcatttggagactgtgtctagcgctttggaggtgagctttaactcggacgatgtcgaggtgtcctttgacaacttactatgggccaataatatcaccttcagaaatgtggcgagcgtttccttaaacaatttaacgactgtcaatgcatcccttggcttcatcgaaagcggatttcagaagctgtccttcccagggattacgcgcgtgggcggatctttcagtattgtggacaatgacgatttagaggaaatcgatttttccaatgtgcagtcaatcggagggggccttattattgcaaacaattctaaactcaccgacttttccgagtgggaggacctacagaccgtcggaggggctcttgtacttgaaggcagtttcgacaacgggtcatttcccagcttgagggcggtacgtggggcattttcgctcgagtccgatggagatatttcctgcgatgactttagtgatatcaggggggacacggccggcgaataccagtgctctgcagcttccttcagtacgtccgcaagtgcacagtcgagctcttcaagtacgagtacaggcggcagtagtactcacacagggtcgagtactgccaccagctcgtcctcggaggacgcgggtgttgccctcgctcctgcgagtctcttcacactccttgcgtcgatcgtgctgggctttttatag

SEQ ID NO: 4179 - DNA, 1512 bp, Artificial Sequence
  Optimized genes for Pichia pastoris
atggtcgtcccccgactttattatagcacctccagagcagcacttcagactgcgcgagcaaatcaaagattagcaagaggattggcgactgcggcggcctcgacggggaaagtccgagctgtaatcggtgctgttgtagatgtacaatttgagcaggggcaactgcccgatattttgaacgcgttggaactgcaaaacggagaccagaaattggtgctagaggtggcgcagcatttaggtgaaaatacagtaagaacaatcgcgatggacgggacggaaggtctagtacgggggacgagcgtgactgatacgggcagtcccatatcagtgccagtaggacggggcaccctcggccgaattattaatgtaattggggaaccgattgatgaacgaggcccgatcgagtgtaaacagaggaaccctatccatgcagatcccccctcttttgtcaaccaaagcacggccgcggaagttctggaaactggaattaaggtggtcgaccttctagcaccgtacgcacgtggtggcaaaattggactttttggtggtgccggggtgggaaagacagtgtttattcaggaactcatcaataacatagcaaaggcccatggcggtttctcagttttcaccggtgtaggggagcgcacacgggaaggtaacgatctttatcgcgagatgaaagagacgggcgttatcaacctcgaaggggactcaaaagtggcacttgtttttggccaaatgaacgagccgcccggagcaagagccagggtagctctaactggacttactattgcggaatacttccgggatgaagaaggacaggatgtgctactgttcgtagataatatatttcgattcactcaggccgggagcgaggtatctgcccttctcggcagaattccttcggccgtcggataccaacccacacttgccaccgatatgggcttgcttcaggaacgcatcacaaccacacaaaaagggtcggtgacgtccgtgcaagcagtttacgtcccggccgacgatctcaccgaccctgctcctgcgaccacattcgcgcacctagatgccacgactgtcctgtcaaggggtatttcggaactcggtatctatccggcagtagacccgctcgacagtaagagccgcttacttgatgtggcggtagtagggcaggaacactacgaggttgctactcaagtccagcagactctacaagcgtataaatcccttcaagatatcatagcgattttagggatggacgaactcagtgagcaagacaagttaacagtggagcgtgcacgtaaaattcagcgatttctgagtcagcctttcgcggtggctgaggtgttcactggtattcccggcagattggtccgtctcaaggatactgtgaggtcgttcaaagaagtactcgatgggaaatatgatcacttgcctgagaacgcattttatatggtagggggcatcgaggacgttgtcgctaaggctgagaaattagccgccgaggccaattaa

SEQ ID NO: 4180 - DNA, 1731 bp, Artificial Sequence
  Optimized genes for Pichia pastoris
atgagcctgataggaggcggtagtgattgcgctgcagggagtaaccctttagcacagtttaccaaacatacccaacatgacacaagtctccaacaatccatgcgcaatggcgagtttcaacaaggaaaccagcgtatgatgcgaaatgagtcaactatgtcacccatggaaagacagcagatggaccagttcatgcagcagcaaaataaccctgcgttcaattttcagcccatgcagcatgaactaaacgtgatgcaacagaatatgaacgcaccacaacaggtcgccaacaatagctggaaccaggaatttcgaatgaaagacccaatggttgcgaacgccccctccgcccaagtgcaaactcccgtgcagtctacaaactgggctcaagactttcaacaggccggacccgaggttcagcatcacgcacaacagcaccaacatccgatattgtctgtcccaggtgtgagagcgggaatctacggtgggggccgtctcatgggtggctccatgatgaatcgggcggcacagatgcaacaacaaaacccagctcaagctcagacgtcagaacaatcacaaactcaatgggaggaccaatttaaggacatagaaagcatgctgaactcgaagacgcaagagccaaagactaagcaacaggaacagaatactttcgagcaggtatgggatgacatccaggtgtcgtatgctgatgtggagctcactaatgatcaatttcaggctcagtgggaaaaagatttcgcgcaatatgccgaaggtcggctcaattatggggaatataaatatgaggagaaaaaccaattccggaacgatccggatgcttatgaaataggtatgcgactcatggagagtggggctaaattgagcgaggctggcttggcatttgaagccgcggtacaacaagatccaaaacacgtcgacgcgtggctaaagctaggtgaggtccagacccagaatgagaaggaatctgacggcatagcagctttagaaaaatgtctggagttggatccaacaaacctagcagccctgatgactctggcaataagttacataaacgacgggtacgataatgccgcatacgccacgcttgaaaggtggattgaaacgaagtatcccgatatcgcgtctagagcgcgatcgtccaaccccgatttggatgggggcgatagaatagagcaaaataagcgtgtaacagaattgtttatgaaggcagcacaactgagcccggatgtggcgtcgatggacgcagatgtgcagactgggcttggagtactcttctactctatggaggaattcgacaagaccattgattgcttcaaagctgcaatcgaagttgagccggataaagcactcaattggaaccggctaggggctgcgctagccaactataataagccggaggaagccgttgaggcttatagccgggctcttcaactgaatccgaatttcgtgcgagctagatataatctcggtgtaagtttcataaacatggggcgctacaaagaagctgtagagcacttactgactgggatctcgttacacgaggtagaaggggtagacgccagcgaaatgagttccaaccagggcttacagaacaatgcgcttgtagaaacgctgaagcgggcattcctaggaatgaacagacgggacttggtggacaaggtatatcctggcatgggattggcgcaattccggaagatgttcgatttctga

SEQ ID NO: 4181 - DNA, 414 bp, Artificial Sequence
  Optimized genes for Pichia pastoris
atggccagaacgaagcaaacagctcgaaaatcaactggcggcaaggcgcctagaaagcagttggcgagcaaagctgcccgtaagtcagctccttcggcggccggtggggtgaagaaaccgcacaggtataagcccggcacagtcgccctccgagagatccggcgcttccaaaaatcgacagaactactaatcaggaaattaccttttcaaagactcgtacgcgaaatcgcgcaagacttcaagaccgatctgcgattccaatcctccgctattggcgccctacaggaaagtgtcgaagcttatctcgtgtccctgttcgaagatacaaatttatgcgcaatccacgccaaacgtgttacaatccagaaaaaggatatactcttggctcggcgcctgcgtggcgaacggtcctaa

SEQ ID NO: 4182 - DNA, 312 bp, Artificial Sequence
  Optimized genes for Pichia pastoris
atgtcaggacgtggaaaaggcggtaagggtctaggaaagtcaggtgcaaaaagacaccgcaaaattttgagagacaacatacaaggtatcacgaagccagctataaggcggcttgcaaggcgcggtggtgtcaagcgtatatcggcattgatctatgaagaggtgcgagcagtactaaagacattcttagagaacgtgatcagagacgcggtaacgtatactgaacatgctaagagaaaaacagtgacttcgctggatgtggtatacgccctcaagaggcagggacggactttgtacggctttggggggtag

SEQ ID NO: 4183 - DNA, 588 bp, Artificial Sequence
  Optimized genes for Pichia pastoris
atggcaccaataatccaaaaaccagcgcctttcttcaaaaagacggctgttgtagatggggtctttgaggaggtcagcttagaccagtataaaggtaaatgggttctactcgcctttataccattggcattcacgttcgtctgcccaacagagataatagcctactctgaggcggctaagcaattcgcggaggagggcgcacaagtattatttgcgtctactgacagcgagtactcacttctggcttggacaaatgtcgcgcgacaagacggtggtttgggcccggttaacatccccttgttagctgacacgaaccacaccttatcaaaagattatggtgtgctcatagaggaagaaggagtggcacttcgggggatcttcctaattgatcctaaaggggttttacgccaaattacaataaacgacctaccagtcggcaggtctgtggaagagtcgctgcgactattaaaagcgtttaagtttacagacgagcatggagaggtttgtccagctaactggcaaccaggtgctgataccataaaacctgaggtcgatgcttccaaggaattcttttcgaagagtaaatga

SEQ ID NO: 4184 - DNA, 225 bp, Artificial Sequence
  Optimized genes for Pichia pastoris
atgttccgtctagcagcgcgacaaacaccgaagagaatgttctccaccagtagggttgccgcctccggtgcccatggcgatgtaggcccgtacagcaacctaccctttaaggtaaaaaatagaagagtcccttacgcagtaccgcactttctattcttcgcaataggtatggggattcctttctttgcatgttatgtccagctgaaaagatctggaagtatttag

SEQ ID NO: 4185 - DNA, 1269 bp, Artificial Sequence
  Optimized genes for Pichia pastoris
atggagcggttgagccaattgcgcaaacatctagcgggcgatgatcccgtagagcgcctcacggcgaaaaattctgatgacgtggtaatcgtagctgcctttaggacagccgttacgaaaggaggaaagggaaaatttaaagatgtgaattctgatgtattgctccagaaattgatcgaaggactctttgaacaaaagctaccccccggcttcgataagagtctaattgaggaggttaccgtggggaacgtacttaaccccggcgctggtgctaacgagcacagggctgcgatgctggcagccggtattccaagttcggttccatttttagccattaatcgacagtgtagcagtggtctgatggcagtgaacgacgtagccaataagatactcgtcggtcaaattgcgtgtggccttgctgcgggcgttgagagtatgtctagcaactatggacccagcgccatgccaaaggtcagtaagagcgtactcaagcaccccgagggtgcaaagtgcatgattcctatgggcatcacaaacgaaaacatcaatagtaaattcggcataagcaggacggcccaagatgagtttgcgtcgaatagctaccagaaggcagagaaagccgtacgggagggacagttccgagaggagatcataccaatacaggtagaagtggaagatgaggacgacgaaaatgacgacgacgacgcacctgccaagacgaaaaccattacggttgaccaggacgagggtccacgcccgaacgtgaccgttgagtctttaggtaaactccggcctgcgttcaagaaagatgggtctacacatgccgggaatgcctcccaggtgtccgatggagcagctgttgtcttgttaatgcgacgtaacatggcccaggatctgaaccttccgattcttgggaaatacattgcttgtaccactgtgggagtaccgcctgaaattatgggtgtggggccggcatatgcaattcccgcggtactcaagctcgtagacctaccgaaggaaaaagtaactgtctatgagataaatgaggcctttgctggacaagccctttattgtatcaataaggttggccttgataagaacaaagttaacccaaacggcggagctatagcgctcgggcaccctctcggatgtactggggcgcgccaagtgtccacaatcatgcgcgaactgaaacccggggaaatcggggttacaagcatgtgtattggcactgggatgggtgcggctgcggtattcgccagagaatag

SEQ ID NO: 4186 - DNA, 516 bp, Artificial Sequence
  Optimized genes for Pichia pastoris
atggccgcagtctttttccctaggacttgctttaagtgtggagaagtgggacatttggccgagaattgtcaacaggagcaaaagctatgttataactgtcgggctccaggccacgaaagtaacgactgtccggaaccgaaacagacatcttcgaagcaatgctacaattgcaatgagacgggccacgtacaaagtgagtgtgagcaaccaaaaaaagcagcgaaatgctacagttgcggcaagcttggtcacttcagccgtcattgtcctaactcgtcctcagcctcaagtgcaggcccagttgccagctcgtctacgatctgttacaaatgctctgggccaaaccattttgcgcgagattgccaagctggaagtcctaaatgttacgcttgcggcaaactgggacatatcagtaaggactgtactgtatctggagggtcgactaaggcgtgttataattgcggcgagcagggccatatttctagggattgccccccgaccgccgaggctaactga

SEQ ID NO: 4187 - DNA, 327 bp, Artificial Sequence
  Optimized genes for Pichia pastoris
atgccgcctaagattcaacagtccaaagccgccaaagcggctgcggcgatggcgggtagcaaaaagtcgaaaaaaaagtggtcgaagggtaaagtaaaagacaaagcacaacacgcggtgatacttgaacaggacaagtatgaccggatcatgaaagaggttccgacataccgatatgtaagtgtatcggtcttagtcgacagactaaaaattgggggcagtatggcgagggtggctttgaggcagctcgagaacgatggagtcatcaaaccagtgcttttgcactcgaaacagcagatttacactagagcgaccgcatccgaatga

SEQ ID NO: 4188 - DNA, 975 bp, Artificial Sequence
  Optimized genes for Pichia pastoris
atgtcaaatagtctcgagcaactaaaagcggcagggacggtggtggtgacggataccggggagttcgaaagcattgctaagtacacgccacaagatgccactaccaacccatctttgattttagcagccagcaataaggctgaatatgcgaaactgatagacatcgcggttgattacgcaaagaagcaaggagggtccgttgaggagcaagcgaacatagcactggatcgattattaattgaatttggcaaggaaatactcaaaatcgttccagggagagtcagcacagaggtagacgcccgactctcttttgataaggaagcgaccattaaaaaagccttggaaataatcgaattatacaagtccgtcggcgtagaaaaagatcgtatactcataaagatagctagcacctgggaaggtatccaagcggcccgggagctagaagcaaaatacgggatacattgtaacctgacccttctcttctcgttcgtccaagcagtggcgtgcgccgaggctaaagtgacccttatctcccccttcgtcggacggatacttgactggtacaaagcgagtacaggtaaagactacaaaggtgacgaagaccccggcgtccagagtgttaaggctatatttaattactacaagaaatttgggtacgataccattgttatgggcgcctcctttcggaataccggagaaatcaaggcacttgcgggctgtgacttcttaaccatagcaccgaagcttttagaggagttactgaactctaaggagccggttcctcaaaagcttgatgctagcgcggcgagctcactagatattgagagagtatcgtatatcgatgatgaagcagcgtttcgattcggactaaatgaagatgcgatgtcgacagaaaagctgtcagagggtatccgcaagttcagcgcggattgtgtgaccctactcaatctactaaaagaaaaggttcaggcctga

SEQ ID NO: 4189 - DNA, 2766 bp, Artificial Sequence
  Optimized genes for Pichia pastoris
atgaggtttctagttagctcctttcgtccgtttcgccataccatcagttcacatattagcatgggtcaagcgcttagcgccattcgcgtattccacaaaaattctcattcccgcactcaaggtttaagacgtcactcgcattactgctgtcaccgcaagatcgacatgtccacatccactaagttacccgaaagacagctactcccagcaaacgtacggcctactaaatacgatttgacgctagaacctctttttagcacgtttaaattcaacggagaggagaccattcacttagatgttcaagaagattcgtcgtccattaccctacatgcgctagatattgatctgcaggattcgcttctcattacatcgaacaagagcaagacgcctcctttgcatgtcactagtaatgacgacgaccaatctctaacgttccagttcaaagaggggactttggtgaagggggacaaagtgcaactacaattgaaatttgtcggtgagttaaacgataagatggcgggattctaccggagttcttacgaggaaaatggcgagacaaaatatctggcgaccacacagatggagcctacggattgtcggcgagcatttccgtcgtttgatgaacctagtctaaaagctgtcttcaatattgcactgatcgcggaccaaaagctaacctgcctgtcgaatatggacgttaaggaagaacaatcattgggcgatcgccgaaagaaggtaatcttcaacccaacgccactcatttccacttaccttatcgccttcatcgtaggggatttgaaatacatagaggctgattataattaccgaatccctgtcagagtatatgcgacgcctggccttgagaagcaaggccgtttctcagttgagcttgcagcaaagacccttgaatttttcgaacaacagtttgacatagactacccactgcccaaaatggatatggtagcaattcacgactttagcgccggagctatggagaattttggtcttgttacttatcgggtggtcgacctgctctacgatgagaagaactcaaatctagcgacaaaacagcgcgttgccgaagttgtgcagcacgagctggcgcatcaatggtttggtaatttggttaccatggagtggtgggaggggttatggctgaatgagggattcgcaacgtggatgagctggtattcctgtgataagttctttccggattggaaggtctgggagcagtacgtcactgactctttgcagcaggctcttgccctagacgctctgcgtgccagtcatccgatcgaggtcccggttaaacgagctgatgagataaatcaaatttttgatgccatttcatacagcaagggctctagtcttttgaagatgatcagcaaatggttaggagaggacgtatttatcaaaggcgtgtcttcgtaccttaaaaagcaccggtatggtaatacgaagaccacagacttatgggagtctctatcagaagtgagcgggaaggacgttgttaaggtaatgtcaatctggacgggtaaaatcggctttcccataatctcagttacagaaaatgctaatcggataacatttacccagaacagatatttaactaccggtgatgtcaccccggaagaggatacaacgatttatccagtcttcctgggtctcaagaccgaatcatccacagacgagtcgcttgtgctcgatagccggagtatgagcgtggacatccaaaattctgacttctttaaagtgaacgcggagcaagccgggatctacagaacgaattatgcgccggaaaggtggataaaactggggaagcaacctcatcttctaagcgttgaagaccgtgcgggacttgtggcagacgctggggctttggctagttctggccatagctccacacgtaattttctcaacctagtcaactcttggaaagatgaatcgtcgtttgtcgtctgggacgagatcacgagcagggtagcagcattgaaagctgcctggctttttgagtcccaaagtgacatagatgccttgaacgctttcgtacgggatcttatttccactaaaattaagtctataggctggagtttcaatgataacgaaccctttctagaacaaagactgaagtcactactctatgcaactgctgcaggcgcaaaggtcccgggggtcgtaaagagcgcattgatcaactttcagaaatacgttgcaggagacaaaacggcgatccatccaaatattaaggcggtcacgttccagaccgttgcggcgcaggggagcgagaaagagtgggaccagcttttggatatatataaaaatccggtatcaattgatgagaaaattattgcattgcggtcattgggacgttttgaagaccctatattaattgcgaagacattagcgcttcttttcgatggctcggttcgctcacaagatatctacgtccctatgcaagggttacgggccactaaaattggagttgagagcttattcaaatggttaacactgaactgggataaaatctacaaactacttccgcccggcttatctatgctagggtcggtggtaactatatcaactagcggctttacctctttggacgatcaaaagcgcgtaaaggatttttttgccagcaaagacaccaaggggttcgatcagggacttgcccaagcactcgatactatccagtctaaggcatcgtgggttcagagagattcccgaaacgtgtccgactggcttagggagcagggctacaagaagtaa

SEQ ID NO: 4190 - DNA, 1581 bp, Artificial Sequence
  Optimized genes for Pichia pastoris
atgatgaccgaccagataggcaatcaagcctcgcctgcttctaactcgtatttaaacaatgatggtatagacgaactcacgccaatgacccgtcgcaaacgagttagttcattatcattgtccgatcagtgggcagggtctctgcagatgactcccactacagggtccactgggaatttgaaacggatcggatcaagtaagcttagtattaataacggattaaacgccgtgagagtcaaaaagaccgtcatcgaccacgtccgcgtagcgtcttatgcattcgctttcgatatcgatggggttatcgtaaagggccctgagacgatcccagaagctaaagaagccctaaaactcttgaatggtgccaatgagtataatatcaaggtcccatatatttttgtaactaatggaggaggtagggctgaacaagccagagctgaggaactatccaaacgcttggacattgaggtcacggaggatcaggttatccagggtcatacaccaatgcgcgagttagtttccgtctataacaatgttctcgttataggaggcgtaggtgatgcttgtcgtaaggtagctgaaaagtacggatttaaaaatgtcttcacccccttagatgtcatgaaatggaatccctcggtaacgccttaccacaatcttaccgaggaggagttagcagtcgccagggatgtcgacttctccaacacagggattgatgccatactggtttttgcagattctagaaattgggccgctgatcaacaaatcattttggaactcctgcttagtaaatccggattcatgggcacagtaagcgatagcttcgaggagggaccggcactctatttcgcccactccgactttgtctgggcaacgaattacaatctcagccgctacgggatgggtgcattacaagttagcatagccgcactgtatcgtgaacacacaggtaaagagcttcaagtaacccggttcggaaaaccccaacgaggcacttttaagttcgcatccaaagtactgagccaatggaggaaagatgtattagaggagcacgtcgaggagctaacgacagaagaggggacatctgatatggaagagcagagtccaggggatccgttgctgaacgacccttctcagaacatgaataggaactcaaagcctactctcttggcaacggaatccgagtcagaatccgattcggataacgagggccttactgttgagaagctgtcaaaactcacgctcgacttaccgccagcatcgacagtatatttcgtaggcgatacccctgagtcagacatccgttttgcgaattcgcacgatgaaagctggtactcgatcttagtgaagacaggggtataccaagagggcagcatcccaaaatacaagcccaagcacatctgcgaaaatgtacttgaagcagtcaagttcgccatcgaacgcgaacactccaaagagctggaagagtggaataactcggctgtggaccctgatgctgccacaactcagttaagccccctcacacttgtggaggaaaccaaggttgtgcctaaaaaacactccgctaaatttgaaatgtga

SEQ ID NO: 4191 - DNA, 885 bp, Artificial Sequence
  Optimized genes for Pichia pastoris
atgagtgatccgaagccacttccatttgtctaccagttcctaagtggcgccatcgcgggtgtttctgaaatcttagtcatgtatccgctagacgtcgttaagacaagaatacagctacaagtagggagcggtgcaaacgctgaatacactgggatagtcgactgcgttacaaaaatcgtaaagaacgaaggcttctcaaggctgtaccggggaatttcagcccccattttaatggaggcgcctaaacgagctacgaagttcgccgctaatgacgaatggggcaagttctaccggaatgcttttggggttcagagcatgacccagtccctggcagtgttaacgggcgcaaccgcgggtgcaacggaatcattcgtagtggtgcccttcgaattagttaagattcgcttgcaagacaaaagttctaagtattccgggatgggcgacgttgtaaaacagattgtgaagaaagaaggagttctttccttatataatgggctagaggccacgctgtggagacatatttggtggaatgctgggtatttcggcgtaattttccaagtgaggtcgctgctacctaagaccgagtcaagcacgcagaaaaccgcaaacgacctgctgtccggggctatcggcgggaccgtaggcacgatactgaataccccctttgatgttgttaaatcacggatccaaaacacggttaaggtgccgggcgtcgttccaaagtataactggacattaccgtcgttgctcctagtaacgaaagaggagggattctcggccctatataaaggatttttacctaaagtgctgcgcctgggccctggaggtgggatcctcctggttgtatttacgacttgtatggatttctttagaacgctccagtag

SEQ ID NO: 4192 - DNA, 546 bp, Artificial Sequence
  Optimized genes for Pichia pastoris
atgagttcaacaaatacagttcctcccgtaagtcaatacaaagagttcgaggttatcggcagacggctaccgactgagaccgtccccgagcccaagctctatcgtatgactatctttgctaagaatgaaacgattgccaaatcccggtattggtatttcctccagaagttacacaaggtcaaaagggcgtctggtgaaattgttgcaataaaagaggttctagaggagcggcctaccgaggttaagacgttcggcatctggatccgatacgatagccgctccggcacacacaatatgtataaagagtatcgagacgtaactagagtgggggctgtacaggggatgtaccaagacctggcctcgcggcaccgtgcgcgctttcgtagcatacacattctcaaagtcgtagaattgacaaatgatgacgacattaagaggcagtatgttcggcagttcttggagaaagatctcaaattcccgttgccccaccgcgtaccgaagacgcaagcgttgtatgcatcgaaaaggccatcgacattctactga

SEQ ID NO: 4193 - DNA, 306 bp, Artificial Sequence
  Optimized genes for Pichia pastoris
atgagtttcgtaatacggcggaagctttctacactgattccacccaaaatcgccagcgctaaaaaccttggatccaacccccacgctaaaaagatacaagaggtagtgaagttttacaaagcccttcctcagggtcaagccagttttcccaaagcgtcatcaccaatcggtaaatacggagagaaatattttaatgatggtaacgcgtccgccaaacccctccttcatttagcattgggagtgatattatttgggtacagcctcgaatattactatcatttgcgacatcataaaggggaacattga

SEQ ID NO: 4194 - DNA, 1311 bp, Artificial Sequence
  Optimized genes for Pichia pastoris
atggcaatttcaaaagtattcgctcgatatgtctacgattcgagaggcaatcctacggttgaggtggacctatacacagaaaagggactatttcgagcgatcgtgccaagcggtgcctctaccggcgtgcatgaagcgcttgagctcagggatggcgataagtccaagtggctagggaagggagtcctcaaggctgtagcgaacgtcaatgatattattgcaccagcgatagtgaaggcaaacattgatgtgaaagaccaggaagcaattgacgcgttcttaaacaagcttgacggcaccccaaataaaggtaagctaggggctaacgcagtattgggtgtttcgctagcagccgcaaaagcgggagcggcggagaagaatgtaccattatatcagcatattgcggacctatcgggtactcctaaaccttacgttctaccagtaccattccaaaatgtcctaaatggtgggagtcatgctggcggggcgttggcatttcaggagtttatgatcgttcccacagacgctcctactttttcagaagcattgcgaatcggaacagaagtgtaccataatctaaagtccctagcgaaaaagacatacgggcaatccgcaggtaacgtgggggatgaggggggtgttgctccggacatcagcacaccgaaggaagcattagatcttatttccgccgcgatagaaaaagcggggtacactggaaaaattggaatagcgttagatgtagcctcgagtgaattctataaggacggcaagtatgacctcgattttaagaacccgaactcagatccatcaaaatggttgtccgggcaagagcttgctgccctatacaaggaactgatctcccaatacccaatcgtatccatagaggatccatttgcggaggatgactgggcggcatggagtcactttttttccacagtggatatccaaatagtaggcgacgacttaactgtcaccaatcccatcagaataaagcgagccattgaagagaagtctgctaacgctctccttcttaaggtaaatcagataggaacactgacagagagcatcaaagctgcgactgattcttatgcggcagggtggggagtaatggtgtctcaccggagtggagaaacagaggacaccaccatcgctgacatagcggttgggctgagagcgggacagattaaaacgggcgcgccggctcgcagcgagagactcgcaaagcttaaccaaatcctccgtattgaggaagagcttggtgataaggcaatctacgcaggcaagaacttccataagtcagttgcaatataa

SEQ ID NO: 4195 - DNA, 615 bp, Artificial Sequence
  Optimized genes for Pichia pastoris
atggcgagtccttcatctaaaatacatcacgtgactaacaagtcaagggctaaccttcggacgcagaaacgcctagcagcttccataatcggagccggtaagaaaaaggtatggctggacccaaatgagacagaacaaatagcccaggcgaatagccgagaagccatacgaaaattgtataaggatggcctgattgtgaaaaagcccccggtcggtcactcccgtgcgcgggcacgggcctttgcggaagcgaagcgggccggccgccatactggatatggtaaacggaagggcacggcaaacgcccgaatgagtacacagacattatggatgcgtagattaagagtccttagacggttgcttgtgaaataccgagataatggaaagattgataagactttgtaccataccttgtatagagagtcgaagggcaacgcttttaagcacaaaagagctcttatcgaacacataatccaagctaaagctgaggcggctcgagagaaagtattaaaagatgaatcagaggcgcggagagcaaagaatcgcgcgcaacgagagagacggcagcagcgccaggcggaaaagagggaggcttttcttaacgaggaagcataa

SEQ ID NO: 4196 - DNA, 1161 bp, Artificial Sequence
  Optimized genes for Pichia pastoris
atgtctaaaaacgctcaagtagacgacttggcgcacggactggcaggggcaggggggggtatattatccatgatcattacttatcctctccttaccttgtcgactcacgctcaaagtagtaagacgcagaagcctttggatgggtctgtcgacgagaaagagttagaacccaaaaagagcagtacgtatgggacattaaaacgcatactgaaaaagcaaggtgttaggggactttataacgggctagaatcagcgatcctcggaatagcggtgaataactttatttattactatttctatgagcttacgggcaacacgctcgaggggctctcccgagggaggaaaaggggatctagggtcggcggtctctcggcctttcagagtatagtagcgggtgcgattgcgggtgtcatatccaggatcgccacgaacccgatttgggtagcgaacactcggatgaccgtcctctcccgcgaacagcgggatttaaaacgggtgaatacgctgcaggccatactgtacattttcaagacggaaggctttaagaccctctttagcggcctaattccggctctttttctcgtgctgaatccaatcatccactacactatttttgaacagctgaagactttgttggttaaaaccaggaaacgggccctcacacccctggacgcgttgttactaggggcgtttggcaaattgataagcacggtaatcacttacccatacgtgactcttcgcacccgcatgcatctacagaacgcggagaacgccaggaactccagtggcgaatccagtgtaagtaatagtgcagtactgagcgccacgtcggacgaagatctaggaaaagaaggtgataacgagaaaaaaatagcccaagaacaacctactaacaccatttggggtctctcgaccaaaatgctgaaagaggaaggcatatcttcgttctattcggggatgagtgttaagctttcgcaatctattctgtctgctgcatttctttttttctttaaagaggaactggtgagcgcctctgacgttgctataaaggcggtcaagaaagtagattataaatctttcctaaataacccggctcaagtagtacctgacttaaacccagccccatcccctaacgcagacggatctccagtcgatatataa

SEQ ID NO: 4197 - DNA, 621 bp, Artificial Sequence
  Optimized genes for Pichia pastoris
atgtccgtctttacaccgattgaagacgccttaaaagcatacaagaacggcgagttccttatagttatggatgacgaagaccgcgagaatgagggggatctcatcgtagccgcggaactcataacgacacaaaagatggcatttctcgtacgttactcgagtggctacgtatgcgttcccctgtctacgaaacgagctgcggagctagagctaccgcctatgattaaaaaccgcacagatagacagggcacggcgtatacccacactgtagatgcgcgggatgggactacgactgggatctcagccagcgaccgggcactaacgtgccaggttctggccaatcctcgcagcaaaccagaggagctgatgcgtccgggacacatttgtccactcatagcgcgagaggggctcctcaaggagcggcgcggtcataccgaggccgccgtgcagctttgtgagcttactggcttgcaacccgcaggggtgattggcgaactcgtaagagacgaggatggttcgatgatgaggttagacgactgcgtccagtttggtcttcgtcacaacgtgaagatcattaacctcgatcaaattattgagtacatggacagcaaaaattcatga

SEQ ID NO: 4198 - DNA, 1683 bp, Artificial Sequence
  Optimized genes for Pichia pastoris
atggcagaaattactttgggaacgtacatttttgagcgactgaaacaaattgatgtaaaaacaatatttggagttccgggcgacttcaaccttgccttgctagatcatatatatgaggtcgaaggcatgcgctgggctgggaatgctaatgagcttaacgccgcttacgcagcagacggatactcgcgtgtcaaatcaatggcggcgcttattaccacgttcggcgtaggagaattatctgcagtcaatggcatagccggctccttcgctgaacacgtcggtcttctccatatagtgggcgtccctgctatttcgtcacaggaaaagaagctcctcctccaccacacactcggcaatggcgattttggcgtgttcaaaagggttttcaaaaatgtgtccaaatcagcaaactttatttccgatatcaacgaagctcaggacatgatagacggtgcgattagggaggcgttcatataccaacgtcctatttatctagggttacctactaatttagttgagatgaaggttgatcggacacgcctcaacacccccatagacttaaaacctgttccaaacccagtggaggccgaagaagaagcattacagtcaatactggaactaattagtaaagcctccaagccagtgattctggtagatgcttgcgcttcccgccatttttgccaaaaagaggtggatcaattgattgatgtaactaatttcccagtttttgttacaccaatgggcaaaggcggggttgatgaacaaaagccgcagttcgggggtgcctatgtcggcagcctatccaatccggatattacggaatttgttgagaaggcggatctcgtcataagcgttggagcactgctaagcgattttaacacggggtccttctcgtactctcacagcaaaaacatagttgaattccactctgattacacgcagattcgctccgctgtcttccaaggtgttcaaatgaaagctctactccaaaaattgctccctcttgttggtaaagcgtccaaacacattaccgcacaagtcccgcctaaaatagcgccgccaatcgagaagggagcatccgaagatttgacccaagattggctctggtccaatatatcgaagttccttagagctggggatgtagtgatcaccgaaactggtacgagtgcgtttggtattgtacaatcgagattcccaacccacgtatcaggcattagtcaagttctatggggctccatagggtttagtgtaggagctactttgggcgccgtttgcgcaaccgaagaattagatccaaatcgtcgagtgatcttattcgtcggtgacggttctctacagctgaccgtccaggaaatatcaaccatggcacggtggaacttaaagccatatttatttattctgaataacgacggctatactattgaacgtttaattcacggggaaaaagctagctacaacgacatacaaccgtgggatcaccttaagctcttagatacgtttaaagcaaaaaacagtgagtcgacgcgtgtttctacagtgggggaactaactaaactctttaaagatcaaggttttaacaagcccgacaagatccgggtcatagaaataatgttagagacaatggatgccccaatcagcctcgttaaacaagcagaaattaccgctaaaaccaatgctgcctaa

SEQ ID NO: 4199 - DNA, 909 bp, Artificial Sequence
  Optimized genes for Pichia pastoris
atgcacagaacgtattcattgagatcagggagagcgccaactgccgcggatgttaacaaccctccgccgccaacttccacaaccaagagcaagtttttcggaaaaaactcgattgcgtcttcgctaaggaagaatgctgcgggagctttcggcccggaattaagcaagaagttggcccagctgattaagatagaaaaaaatctggaaaggtccatcgagttggtagctcgagagaggaggacggtagcgaagcaattgtctttatggggagaggagaatgacgatgacgtcagtgacgttaccgataagctgggggtcctcatctatgagattggtgaactggaagatcagtttgtagacaagtacgaccaatataggatcacattaaagtcgattcgtaacatcgaaagcagcgtacaaccatctcgggataggaaacagaagataacggatgagatagctcatctcaaatataaggacccgcaatcccctaagatacccgtgcttgaacaagagctcgtacgcgcggaggctgaaagtctcgtggcggaagctcaactgtcgaatataacaagggagaaattgaaggccgcatttaactaccagtttgatgcactagcggagctatctgaaaagttggctcttattgccgggtacggcaaggcactcttggaacttcttgatgactcaccggtaacacctggcgaaactaggcccgcctacgatggctatgaggcttctaagcagataataatcgacgcagaaaacgcgttgtcttcctggacccaagacaatgcagctgttcgcccgtctctcagtattcgtaactcggagtacgatgaagaacccaatgaggaatgggaggagaaagaagagggggacgagacacgcgacgagacccaggcatag

SEQ ID NO: 4200 - DNA, 1974 bp, Artificial Sequence
  Optimized genes for Pichia pastoris
atgggaaaaagcataggaattgatctgggaactacatacagctgtgtagctcacttcgctaacgatcgcgtagaaataatagctaatgatcaggggaatcgcaccactccatccttcgttgcgttcactgacaccgaacgtctaataggggacgcagcgaaaaatcaggccgcaatgaatcccgctaacactgtcttcgacgcaaaacgtctgatcggaaggaagttcgatgatcccgaaacccaggctgatataaaacatttccccttcaaggtcatcaataaaggcggcaaaccgaatatacaggtggaattcaagggtgaaaccaaagttttctccccggaagaaataagtagcatggtgttaacaaagatgaaagataccgcggaacaatacctcggtgaaaagatcaatgacgccgtggttacggtgcctgcgtatttcaacgattcacaaaggcaagccaccaaagacgccgggctgatcgccggcctcaacgttcaaagaatcataaacgaacccacagcggcagcgatcgcatatggactagacaaaaaagacgctgggcacggggagcataacattctaatttttgatttaggcggggggacgttcgatgtaagccttctgagcatcgatgaggggatatttgaagttaaagccacagcaggagatacacacctcggtggcgaggactttgataatcggcttgttaaccactttattgctgagttcaagcggaaaactaaaaaagacttatccacgaaccagaggagcctgcggcgactaagaacagcctgtgaacgcgcaaaacgaactctcagctcgtcggcacaaactagtattgaaatcgattcgttgtttgagggcatcgatttttacacgtcgattactcgggctcgctttgaagagctttgcgccgacctgttcaggagcacaatagaacctgtggaacgggtgttgaaagattcaaagcttgataagtcccaagtgcatgaaatagttctcgttggcgggtctactaggattccaaaggttcagaaactcgttagcgacttttttaacggcaaagaaccgaataagtccattaatccagatgaggcagttgcctatggagcggcggtccaggccgcaatcctttctggtgacacttctagtaaaactcaagacctgcttctattggacgtcgccccactatcgttagggattgagactgctgggggtattatgacaaaactgatcccgcgaaactcaaccatcccagcgaaaaaatcggaaattttctcgacatacgctgataatcagcctggcgttctaatacaagtgtttgagggtgaacggacgagaacaaaagataataacttattgggtaagttcgagctctcaggtataccaccggcgcctcgcggcgttcctcagatagaagtaacatttgacatggatgcgaatggcattctcaatgtaagtgcggttgagaagggcaccggaaagactcaaaaaattacaatcacaaatgacaagggtcgattaagcaaagaagatatagaacgaatggtatcggaagcggaaaagtttaaggacgaagatgaaaaggaggcggaacgagtagctgcgaaaaacggtctggagtcttatgcttactctcttaaaaatagcgccgccgaatctgggttcaaggacaaagttggggaagatgatcttgctaagctgaataaatccgtagaagagacgattagttggctagacgagtcgcagagcgccagcacagatgaatataaagatagacaaaaagaactcgaggaagtcgcgaatccgataatgtccaaattttacggcgcagcaggtggggcgcccgggggagcgcccggtggttttccagggggatttcctggtggggcaggggccgccggaggggctccgggcggcgcagccccaggcggggattctggcccaactgttgaggaggtggactag

SEQ ID NO: 4201 - DNA, 1479 bp, Artificial Sequence
  Optimized genes for Pichia pastoris
atggtggaagctacgggtgatattgggctaatcgggttagcggtgatgggccagaatctcatacttaacgcagcagatcacggttttacggttgttgcgtataaccgtaccgtgcaaaaggtcgatcattttttggctaacgaggcgaagggaaaatctatcataggcgcccattctattgaggagctggttgctaatcttaaacgtcctcggcgcattatcatattagttaaagccggcaatccagtcgatgccttcatccagcaattgctccctcatcttgaccaaggcgacatcatcatagacggaggtaatagccatttcccggacactaacagacgctacgaggagcttaaacagaaagggatacactttgttggctcgggggtctccggtggggaggagggtgcacgctatggcccatcgttaatgcctggaggggcgaaggaagcatggcctcacataaaggaaatatttcagtcaatcgcagcgaagacggacggagagccatgctgcgactgggtaggggatgcgggtgctgggcactatgtgaagatggtacacaacggcattgaatacggagatatgcaactcatttgcgaagcatacgatttactaaagcgagtcgctcggcttcccgactcagaaattagtaaagtattcgctaaatggaacaaaggggtgttagacagtttccttgtagagattacccgcgatatcctcgcttacaatgatgacgacggcaaacccttagttgagaagatactcgatagcgcgggtcagaaaggaaccggcaagtggactgcaataaatgcactggaccttgggatgcctgtgacgttaattggtgaagctgttttcgctagatgtctgtccgcgatcaaagacgaaagagttcgtgcgagcaaaatcttgtcgggaccctctgttcctgagaacgccatcaccgataaggccaagtttatagacgacctggaacaagcgttgtacgcgagtaagattatatcctatgcgcagggctttcagctgatacgagaggcggccaaggaatacaaatgggacttaaactttcccagcatcgcgctcatgtggcgcggcggatgcattattaggagcgtctttttgggtgaaattactgcggcctatcgggagaatcccgatctagaaaatctgttgtttcacccgttcttcaataatgcgatcagtaaggcacagagtgggtggcgcgccacactgggaaaagcgatagagttcggcattccgactcccgcgttctcaacggctcttagtttttatgacggatacaggtctgagaagttaccagcgaacttactgcaggctcagagggactatttcggtgcccacacatttaaggtcctgcccgaggaggcgaacgaacgtttgaaggtgggcgactggatccacataaattggaccggcaagggaggcaatgtgtcagcctcgacatacgatgcttaa

SEQ ID NO: 4202 - DNA, 840 bp, Artificial Sequence
  Optimized genes for Pichia pastoris
atgggtcagctctttcgaaaaatcattcagtggattcccctacttttctttgcaggtagcgtcttgcttcagtttttcgttatcctctctggggctaggacaacaggggtacttaaggacttttattggcttgaagtagagggtacgggcgcaatagatccccaatttggaacaactcgatggacgaattatcgcatgtgcaactgggagaacgacgagctgtcaaactgcgaagggccgcaaccggcctatcccttctcaccagacaataacttttcggacggagagaatagggcgctgattccatctgactttataaatcatcgtgacacttattattacctttcaagggtgggttggtcgatgctgctcgtgggattagtcttcacagtcttctcattctttagcacgttgttgaggatatttcttaaatggaaattagtaagtggtcttaattggttgaatagcgtttttgctgtattcttcgtggccttgggtgcgtcacttatgacggctgcatacgtaaagggccgtaactcgtttaacgatgcgtccgaatttgacgcgtcactgggagtgaagatgtttgcattcctctggaccagcttagcgctgcttttattgtcactcccaatattttgctttaaaaagcctcttagctcttttcacgggggtactgggaccgcctcgcacgacgactccatagaatataaggaagactatattccccccgccactggggacgcctacaaccctgagccggctggtgactacccaccgactcagaagcggaagctcaacttttttaagattaatcgtaaaacgactatcgaggactaa

SEQ ID NO: 4203 - DNA, 660 bp, Artificial Sequence
  Optimized genes for Pichia pastoris
atgtctaagtcggccttgttgataatagatctccagaatgatttccttgagggtggatctcttgcagtaccagacggtaacgagatcattgacccaataatcgaattagcacaaaagaaagattgggacttagttattgccacaaaagactggcacccgcaagatcacacgtccttcgcgtccaaccatggagttaaaccatataccgaattagaatttaccaaccccgagaatgaagcagagaagaagatccaggttgtgtggccggatcattgtgtccagaacagtaacggttccgagtttcccccaaagttcaaagcgttttgggagcagttcacaggcccgaaagaattagttaaaaaaggatacttatctgatagggagtattattcggcgttttcggacgtgtggaagttacataagaccgagttagactcgctcttaaaagggcatggaatcagaaatgtaacaattgtaggacttgcactcgacttttgcgtcttccacacggccagcgatgcactgcgggagaactacagcgtaactttagtcacgaatctaacgcgctcggtcgcggatagagagggtccccctagtaagcttcagtcgctaggtgcgcatctagctgaatataacggaagtgaaataatcattaagtaa

SEQ ID NO: 4204 - DNA, 858 bp, Artificial Sequence
  Optimized genes for Pichia pastoris
atgtctcggctaattgtggctcttcacacggtattgaagagattcaaggaaatggggcttttcactgattcagacaaagataattcggataagttgagcgagtcgtcgtcttctacttcgtccaactggttggataggtatctttcaattgcccgcgaggcaaaacactccctagcgtctaagattgaggacgtggctcttccgggggaagacggaactttgttcaacaaaaatatcgatacaaaccggcccgactctatattccgcgcagtctttggggacgacttcgaaacaacttttaataaagtcgacagtcttgtgaatgcaatagcaccagttttcgaccaggatgtgtggtcagagctgttcaccggttctaaactagtgagctcgaagtacggcctctgggcgtacccgataccatcacaccaattgtacaaggactgtaatagtaaacagggtctctcggtttgggatgagcatgggtattggcgatgcctctttcctaaggcgcaactaccggaaaactataaatcgatcgactcgaacatcatcagcaaagaagacgtagagcaagatgacagccacaagcttgggcgattcttcactaatttctcagactacctaaattggagatccgtgatggaggaaaacataaagaaacaaagggtgtcctttagtaagccccagaagtcctcaggttccagtacgagctattcggagaggactctccccaatggagaaatcgaaaaaatcgagaagaaacacgagtggttcgttgatggaactgaacgatctaaggagactaaaacgataattcatccggatggatcggtgacgacagagaatataaaatga

SEQ ID NO: 4205 - DNA, 909 bp, Artificial Sequence
  Optimized genes for Pichia pastoris
atggccgtcgtaacacttaaaaatgctatcctatcgctctttccagctaacactagtgactctcaaaacgagcccttgctaggggaggattcgacaggaaatgcagggtacgcagcgcgtgacgttcagggtctagagagcgaaatcgagagcaactcaacgaagacgcagaacatttcagaggataatcaaaatcaaacagtactatgggggcttttcgagaaggtggatccccgagtgatgtcagacattattattggattatcagatggattaactgtgccattcgcgctcacggccggcctatcaagcctgggggattcaaaactcgttataactgggggaatggcggaacttgtatcgggttcgataagtatgggcctgggaggattccttgctgcaaggtctgaatcggagttttataaatcccaggtcaggaaggaaaagcaacttttctttaataacaaagagcttcttgaggaggagctcgaagacatctttttagacattggtatgagcgagactactacggagtctgctattcgggatctttctaaatcgcccaaggccatgatcgatttcataatcagacatgggaaagggctcgaggagcctgcggatggtcgtcaagtgacgagtgcattgacaatcggtttgagttacttcttaggagggtttgtgccattggttccttatttctttactgcgattgtgcaaacagggctcataattagtgtgcttgtcatgggggtaacattattctggttcggatatctaaagaccgctatctccatgggcgaggactgctcactctggatgagggtttccgaaggactccagatggtcttaatcggttcaatagcggcaggcagcgcgtggggcttggtccgtgtcatagacactaactag

SEQ ID NO: 4206 - DNA, 1890 bp, Artificial Sequence
  Optimized genes for Pichia pastoris
atgacagtcgagacgaaccaatttacttacctacaagggtcgacgtttgacaaaaaaatgacaacactttcgctcaaacagactgcttacgaatttgtagaaggcatgacaggtgactaccactacctcaagaacttggatgcttcagactctaatctgcgttaccttaaagactattccttccctacacttcaggaattgaatctcagtaacctctcctacctgaagaagttagtatcggacggagaccagctgagtgggctggagaagttgactgcggacggcagtaatatcgaactcatagatatcaaaggggacgtattagcgtcgataagttgttcaaatactaaagagctgaaggcaatcaagggggaactcccggctatcaactacatctacgcagataacagctcactagaaagtgtctcactgctaccttacgaagatgagaagttccaattcaagcgtatgttttttctatatctggtaaactgtccaaacctcatctcatttcagcgaggtcaataccctaaactccgtacggttgacctaagtaactctactattcaggttttacattcgtccctgatcaaacacttaggcgcactgtacctcggcaatgctactatcaaagagtttgttattgatgacaacgataatgaggacgagttgacgttgcgccagcttaagacactgaatttgtctaattcgcgaattccaacaaatatgaccgatttcctactccgccacatctttcgcaagaaatcaaatccctgggataaggaatggtcatctttaatttggcaaagtgttaatacggaccaagaggtccaagaggtgcaatctttcatcaagaggattccgcagttgaaaaaactggatattagtaacagttctaaagctaactcactcttatccaacctagtgtcggatattcccgaattttggaactctcttgaagatctcgacgttttcaatagtaacaccgagggtttcaacttctcaaattccaaatctctaatacaccttggatgctcagatcctgacgcaacagtactaaaggtggatgatatgccagctctgaaggcactcgacgtcctgggaccaagcaacattgagactgttaagctcagtaactgtatccggcttgaaaaggtagacttcactggctgctacgctttgaaacgttttgagagtgactcgctcagcctgttgcagttgaagttctctaacaattcactggagacatggtcattaaatgattcgagtataagaagtatcacgctggaaaataacacgggtttccgtcgcttggaagggaactttccaaacctcgaaaccttagacatatctaattccgccgttgaggttataaacattcatgatgggagcaagcttaagaaactatccatcttgcggacaagatcagtcgaggaaattcagatcgacaacttgtctaccctacaagagctcaggtatgatacgaaagatgaaaaaaacaccaaagccgttaaggaattcgcagacaagatcctgtcgaaacgggaacctagctttacagccaaggtattacaacgtgtacgtttcgaacaccgtgggttgtttaccgggggattccggtttttcgatcgccgcactgaagagttagtatgttgctttaaagacattaacatttcagaaaataaaattaacgcgaagtgtggtatatgtgaagaaaattatgaggaagggcagaaatgtcaaatactttattgtaaacatgcattccatactgactgcgttgaacagatgctacaaatgggcaacgataggtgtcgacattgtaacgacgagatcgatattgcgagtgtgggtctcagtagtgatcctcttcccttccgatggctatag

SEQ ID NO: 4207 - DNA, 1812 bp, Artificial Sequence
  Optimized genes for Pichia pastoris
atgtcttcaatattcattagtttttttaaacttgtccaactgcgcttccggtattattggaatgtgctggcaagtttctttccactacttacgctcctctccgatggtctgaatcatgtactcccccccacccgtaaaatctccagcgatagtgaggaaagccacgaactcgacgacaagaaatcgctatttcccgagtcacaacaaaggatcacacagataaaagtattcaaaaacgttcacccatgttccctaaccttcaatacaaaactagtcccattcaaaaactcgaacggtgagatggaatggaagttcgtggaggacaatgagtctgcagaaaagtctccgtccctgatggaagatgggttatccgaaagtctatcgccattcatggctgattctacacaagattcagacgtgcatctaatgtttgggacgcctttcttagttaaagaagaacaacaacaacataaacaagaacagcaacagcttcaagagcaagaacaggagcatcaacatcagcagcatcagcagaatctcccgtcgtccagcaattccaaagacgggtctcaagatcactcgtccttggccgaatcaagtaaggagctcaacattcacaaaaggaatagacgcaaacgtgtatcctccgttgtaaccagcgtgaccaatggcgaaacttactatcattgctccgaatgtcccagcaaattcaaattccgtgggtacctcacgcgacattctaagaaacattcacaaagaaaagcttatcattgccctttctacgaaagtggacatggcaaatgttcgctcggtgaaggtttttcccgacgggatacgtataaggtacacttgaaggctatgcacttcaagtaccctaagggggtaaaatgcgcggaccgcactggcatgatggggtggtgtgggtcgtgtggccagtcgtttcaaaataacgagatttgggtagaacgacatattgagaaaggtgtgtgtcgcggccttcctgaggggtactcaagtcggatcatgacacgtaatcgcaaaaaaacaggcaaacagtcatcactcctgaacgttgcgaacaatggggtaaacgagaaccctatgcttaaattggtaatggacggtgaagtggtctctgccccaaagctggaagatgtgacacatctgctaggcgagagtggaagtactaatacttggaccgaaaatagtgagaacgctagtcgaacatcgagcattcatgacctcagtgaccacagttcagcgagcgacagcttgagtgggcacacctctggtgagtccctggcggggtcaaccaatgacagcagtagtcaatcattagacgaagcgattaaccctataggccatcccgtggaccgaagcttatttgctcatcctaacagtaatggcgagatgtttgggaggtcatggacagcccgagagtccagtttgcactcggtggtggatccgtttggcggccaggtacaagcccaggtacaggcgcagatatacatgaaaagccaggccgactcgcaagtgtcacagtctgattcacaaaaacaggtcaattttcagactaacttccagcaaatacctcaaaatttcgagaacagtgttccgttggccatgccaatcggggatgatgatttcccggccctagacggcgaaaacgcatacatagcgttgcttcagcaacaccggcagctgcctgatagtcggccggaaagagcaaaacccgctcatttgggtcaagaccctctttttcacccaaacatgcatgtctcctggctgtcccagcctgatctcacgttttga

SEQ ID NO: 4208 - DNA, 1089 bp, Artificial Sequence
  Optimized genes for Pichia pastoris
atgttgaagctgtatgccatacggccaatacggcccatcaaaccctgtctcgtcgcatctaccttccgacactactccgtcaaagtagatactagtaacaaagcagacgtaatcaaggattcccaaacggataccacgtctaagccaggcgctgaacatgggcacacgcttggtcaatacatcaccaaaaagctcatggttcgtcagaggctaccgactgaaaaacgggacgattcttttctaactcccccagccatgccccatcacgggtatcgtcaagatctaatggaaaaaatccattatgaacaccgtgaacctaccttgattcgcgataaactggcgtttggcttaatgagaagtctgcgagtgtgtttcgattttttttcaggttacaagcatccaaaaacgaaggaaggactcgaaaaattgactcctgccacctatcaaatgacacctgaaaaatggttaacgcgattcattattctagagagcatagctggggtgccggggtctgtagcctcattcctacgtcatctccaatccctgcggctcttaaaacgagacaaagcattcattcagacgcttcaggatgaagcgtataacgaacggatgcaccttcttacttttcttgagatcggcaagccaggacccttcatgaaggtgctgttatatgccagtcagggagtcttttgcaatttgttttttttcacatatatgctagctcccaacgcgtgtcatcggttcgtgggatacttagaggaagaggcggtttatacttataccacttgtctcgaggacatagaacggggactgttacccgacattgagcacttcaaagtccccaagatcgcgaaagattactggcatttaagcgaagatgcaaaaatgagagacttaattagctatatccgggcggatgaggccaagcaccgagaggtcaatcacactttcgcaaatttgaagcttgatggtacggatagaaatccattcgccttgcaggtagattcagtaccggagagtgctcaacctaataaccgcttatcaacgcataaagctgtagggtgggaacgtgatgaattagtcctctag

SEQ ID NO: 4209 - DNA, 1683 bp, Artificial Sequence
  Optimized genes for Pichia pastoris
atgcccagccttctgcaggaggataacgccacgtttaaactagcgtcggaactaccggccttcgaagaacttaaagaactgtacaaatccaagggcaaaaattttagtgcgaagcaggcttttcagaaagacccagcccgttcttcaaagttttctcatactttcaaaaacttcgatggtacagaagtttttttcgatttttcaaagaacttgattgatgacgagatattggcaaaactatttgatctggcgaggcaggcgaatgtcgaaaagcttcgaaatgagatgttcgccggtgaacacattaatgttacagaagacagggctgtcttccatgtcgccctacgaaaccgcgccaaccgtccgatgtacgttgatgggaagaacgtggctcccgaagttgactcggtactgcaacatatgaaagaatttagtacacaggtacgagatgggacatggaagggatacacaggaaagcagattaccgatgttgttaacattggcataggtggatccgatttaggtcctgtcatggtcactgaagcactgaaaccgtacgcgcaggagggcttgcatgttcacttcgttagcaatgtagatggcacacacatcgcagaaacactaaagtaccttgatcctgagagcacactgtttctcatagcttctaagactttcacaactgccgaaacgatccgtaacgcgaacaccgctaaggactggttcctatcaaagacaggaaataaatcggaagctatagccaagcattttgcggctctgtctacaaatgcggaggaggtagctaaattcggtattgacactaaaaatatgttcgggtttgagaactgggtgggaggcagatattccgtctggagtgcaataggtttatcggttgctatatacataggctttgacaatttcgaggattttctgaaaggcgccgaggcggtagaccgtcactttcttgagaccccgttagagcagaatatcccagtgatcggaggtttgctttcagtatggtatactaatttttttgggagccaaactcatcttgtaaccccttttgatcagtacatgcatcgctttcctgcgtatctgcagcaattgagtatggagtccaatggaaagagtgtcactaaggggaacgtctttgccaattactcaactggccccgttgtgttcggtgagccgactaccaacgctcagcactctttctttcagctcgtccatcaggggacacacctgatacctgcggacttcatcctggccgcgaaatcgcataatcctgtggcaaataacgcgcaccaaattctattagccagtaacttcctcgcccaagcggagtcactactcctcggcaagacagaagaggaggtagcagcagctggcgcaacgggtggtctgatcccgcacaaggttttctcggggaatcgtcccacgacatccattctgacccagaaaatcacccccgcaaccttaggaagtttgatcgcatattacgagcatgtcactttcaccgaaggtgcgatctggaacataaactcattcgatcaatggggagtggaattaggaaaagtcctcgctaaggccgtgcaaaaagatttgcaggatgatagtgccaatgtggaagaatcgcacgattctagtaccgctcaattgatcaaaaagttcaaggcttgggcctaa

SEQ ID NO: 4210 - DNA, 768 bp, Artificial Sequence
  Optimized genes for Pichia pastoris
atggctttaacgaaaaagcctgtaatcaaacccattttcattagcaacctggaccagatcgaaaaggtagaaaaggttgaaaaaacacgcgagcaagctctaaacgacattcgtgagaagttgaaatctaataagttaaagcaggaagagaaagcccgggaggaaaaggagaaacaagcgacggtaatgtcgtggtccccgtcgcctattgtggcgaagaagtcatctagttgggggagtcaatccagtggttcgtctggaagcggtacggaatcaccggcgatacgggattttcggcgtaagcaaagccgcgaattatttggcgattttaaactaaacatacccctgaaacaatccaaatcagcacaatctatcatggtcctaaatagcgataactcgagtaactcgtccaagcgtccttcatttaataaaggtcgtagtgaatcagtgctacaattcacagcgtcaaataataaattagactctatatggcttcacaagatgactaccataagccgtcagcatagcgttgtatcctcgctggatggccaggatccgaacgaagaggatgatataatggaagacgtagagcagtttcacgttgtaagtggaaccaccactccgctggatattccctcgtcctgccaccactccccaggcgattcggaatacctggacgatgcagattttgttgcagtgtcccctaaatctcaacccccatcgatgtcagacctcgcagactactataaccaaaaccagttcttatag

SEQ ID NO: 4211 - DNA, 1074 bp, Artificial Sequence
  Optimized genes for Pichia pastoris
atggatagcatactgaccaatcgatgtcttacccctgtgtccaaccacgaaacgtttaatcttgtgggtggatccaagagcctaacgagtgcagagactcgcaagaacagtgacgagcgatcctcaatttctattccaagtccaccactatcaccgtatcagcgtagcctggacgtcgagcgtgatcataaaatattcgacgtagtcggccgctcgaacgaccagatcgttggagattttgaagaaccagcgacgaagactcagacagaacagctcgaggaagggaaaccggatgatgcccctaaaattagttctagcgtattgttgtcgaatcaaactttcccaataaaagatcttacaaacgccaaactcactgtgaatgcttgggcttcgattaattccggggattcgtccttcaaagaaaaccagctggtctttcttgatagttactacaatatcatcgatacgagaaagaagcgtgcgccacgcaggaaatacccaacagcccagccacgccgcagagtattcttctccgcaagtgagagcgaaactccgaacgaaagggttcgcactcgcagagtaatccgcgacaatgtaaagtactcggactatgagagtgaagttgagatatcacgaccgtcaaccccgaaacggagcactaagcgcgtgagtaaaccaagtacgcctcagccacaattttactcggactatgagagcatacccgattattcgcccccattgtcaaccctccctccgaataacacaaaagccttgaaagctgagtggaagggacagcccatgaatctatcagacgatccattagtagggaagctgcatccagcagaggttacattagcatcggtgttaagactaccctgtaacgtttatcttgacagcaaacgccgcctattttctgagaaggtatctagattccggttgggcttgccattcagacgtacagacgcacaaaaggcttgtaaaatcgacgtgaataaagccagccgcctcttcgcggctttcgaaaaagtagggtggctggatgactaccactttagaaaattcctcgacatgtag

SEQ ID NO: 4212 - DNA, 1335 bp, Artificial Sequence
  Optimized genes for Pichia pastoris
atggtaaaacaagtccttttgctggggagtggattcgttgctaagccaacagttgatatactgtcagctaacaaagatattgaggttacagttgcatgccgcacacttgaaaaagccaaagaactcgccggatcggtcgctaaggcgatctcactcgatgtaacggacgaggcagcactagacgccgcagtgagtcaggtcgacttagtaatctccctaatcccctacatttaccacgccacggtggttaagtctgcgataaagaacaagaaaaatgtagtaacaacgagctatatcaatcctcagctaaaagccttggaacaacaaataaaagatgctggcatcgtcgttatgaacgagatcgggttagaccccggcatcgaccacctttatgcggtcaagacaatagatgaggtccatcgggccggtggtaagattaagtcatttctgtcatactgtgggggattaccttcgcctgaagactccgacaatcccctcggttacaagttcagttggtcatcgagaggtgtgctgctggcgttaacaaaccaagcaaaatattggaaagatggcaagattgaagaggtgtcgtctgaggaattaatggcgtccgctaagccttattttatctatcctggtttcgccttcgtgtgttacccgaacagagattctaccacctataaagagctttacaacatacctgaggcggaaacggtcattagagggacgctccgatttcaaggttttcccgagttcgtcaaggtcctagtcgacctcggtttcttaaaggaagatgccaatgagatattttcaaagcctatcgcatggaaggatgcgttagcccaatacattggtgcgccttcgtcaagtgaagccgacttagtctcaaccatcgcctccaaggctacttttaagaacgaggcagatcaacagaggattatcaatgggcttagatggctcggattattctcggataatgcgataacgccccgtggaaaccctttagacactttatgtgcgacacttgaggagttgatgcaatttgaagaacatgagcgcgacctggtctgtctgcaacataaatttggtattgaatgggctgacggaagctcagaaacaagaacctccaccctggtcgaatacggggacccgaagggatatagcgccatggcaaaactagtcggtgtcccttgcgcagttgcggtcgaacaagttttagacggtaccctttctactcctggcctttgggctcccatgaccccagagataaataatccgctaatgaagacacttaaggagaaatacggaatctttctgaccgagaagacgttataa

SEQ ID NO: 4213 - DNA, 1152 bp, Artificial Sequence
  Optimized genes for Pichia pastoris
atgacgtcgaataggccccttcctctcttcgcgagcgccgacgtccagaaacacgtgagccccaaggattgctgggtgacgttataccacagaaaggtgtataacgtgacagaattcctagaggaacatccagctggtgacgacctcattctggagtatgcaggtaaggatatcactcagataatgggtgaccagttgtcccatatacactccgagagtgcgtatgaaatgttagatgaggacatgttagtggggtacttagccaccccagaagaggagcgagagctgttgagtaataaggaccacgaagtggaagtacaactcgacagtaagggcaatgttgtagaggtagatatagatcttactgaattcggagaacttccggctgaaggactgttatcattaaagaccgattatgaacatgatttggtaaaacatcaatttctcgatctcaatcgccctttattgatgcaagtgctgcgcggtagttggacgaaagaattctacctggaccaagtgcacagaccgcgccattacggaaaaggttccgccccgctttttggtaatttcttagagccacttagtatgactgcatggtggatcgttccgatggtttggttaccagttaatttttattttttctatattggttttacaaatcaaaacaaactggtcgcgatggcgttttggttactgggcctatttgtctggacctttctagagtacgctctccataggtttctattccaccttgattattatctgccagaaaatcagatagcattcaccattcactttttgttacatggaatacaccattacttacctatggataagtaccggctcgtgatgccgcctaccttatttatagtactctgttaccctatcaagaccctggtgttctcggtgcttccatattacatggcctgcagtggtttcgcaggcggatttttgggctatattatgtacgacgtgacccattatgtattgcaccattccaaactacccagatatttccaggagcttaaaaaataccacttagaacaccactataagaattacgagctgggattcggtgtgacgtcgaaattctgggacaaagtctttggaacatatcttgggcccgacgacgtttaccagaagactaattaa

SEQ ID NO: 4214 - DNA, 1086 bp, Artificial Sequence
  Optimized genes for Pichia pastoris
atgacgcctagatcacacattttctttgatatctcgataaacaatcaacctgcgggccgaatcatttttgaattgtttaatgatatagtacctaagacggcagaaaatttccgcgcactgtccacaggcgaaaagggaattggtaagtcaggaaagccgctgcattacaaaggatcaactttccataggattatcaaagattttatggtccagggtggtgatttcaccaacggaaatggcaccggaggagaatcgatttacggcgagaagttcgaagacgaaaatttccaactcacacacgataagccttttctcctatccatggcaaatgcagggccaggcacgaatggctcgcaatttttcatcacgacagtcccaacaccacacctcgacaacaagcacgttgtattcgggaaagtaattgcagggaaagccacggtgaggaagattgagcgtaatagcgagggcgaagccccgatcgagcccgtcgttatcgaggactgtggtgaactccccgaagatgcagatttaacaatatcggacgagactggcgataaatacgaggaggtgctaaaggacaatgaaaacatagacattgacgattttgaacaggtctatcaggcgatcacagagattaaagaacttggaaccaaatattttaaaaatggagataccaaaattgctttcgaaaagtaccaaaaggctgccaactatctattggagtacataccgagcgatttgagcgaggagcagtccagcaaattggagttgttaaaaacttctgtattctcaaatgtagcattggctggcctcaaggtgagtaagtttaaggacacgataaaatatgcaacccttgtcattgaggatgagagtgctgatgcaaaggcaaagtcgaaggggtattaccgccgggggtcagcatattcttccttgaaagacgaggatagtgccatctctgacttccaaaaagcccttgaattatcgcccggtgatcccgcaatctcccaaagccttcagcgcaccactaaagcgagaaaagatcgccttgctaaagagaaagccgcgctttctaaattttttgaatag

SEQ ID NO: 4215 - DNA, 1641 bp, Artificial Sequence
  Optimized genes for Pichia pastoris
atgctctcagcgagaccagtcattcgtcgggcggccagaagcgcagtcgcgattaacgttgcccgttctgtaccacgagtagtgaggcctttagtctcgagaggatatgcggcggctaaagctgccccgactgaggtgtcttccatcttggaggaaaagattagaggagtgtcagctgaagctgaccttaacgagacaggtcgagtcctctctgtaggcgatggtattgctcgcgtattcggactcaataactgtcaggcagaggaattggtagagttctcgagcggtgtcaagggtatggcattgaatctggagcccggacaggtcggcatagtactttttggcagtgacaggggggttaaggaaggggacacagttaaacgcacaggtaagatcgtagatgtaccagttggtccagaactgctggggagggtcatagatgccctgggaaaccccatagacggtaaagggcccattaactccaaagtcacatcaagggcacaactaaaggcacctggaatattacctagaactagcgttttcgagccgatgcagacaggccttaagtcagttgatgcactcgtcccagtaggtagaggacaacgtgagcttatcattggggatcggcaaactgggaagacagccgttgccctagacactatcctaaaccagaaacggtggaataatgggagcgacgaatctaaaaaattatactgcgtgtatgttgcggtaggccagaaacgctcaacagtagcgcagcttgtccaaaccctcgaacagaatgatgcactaaaatactctatcatcgttgcggctacggccagtgaagcagctccccttcaataccttgctccattcacagcttgtgcggtgggcgagtggtttagggacaacggtaaacacgctttaattatctacgatgacctttctaagcaggctgtagcatacaggcaattaagtttattactgaggcgaccgccagggcgagaggcataccctggcgatgtgttctatttgcattcaagactgctcgagcgggccgctaagatgtctgacaagttaggtggtggctcccttacggctcttcccgtgatcgaaactcaaggtggggatgttagcgcttacattcctaccaatgtaatttccataacggacgggcagatctttctggaagcagagctattttacaagggcatacggccagctatcaatgttggcttgagcgtttcgagagtgggatctgcagcccaagtaaaagcgatgaaacaggtagcaggaagcctcaaactatttctcgctcagtaccgcgaggtggcggcctttgcccagtttggcagcgatcttgatgccagcaccaaacaaacgctcaatcgcggcgagcgcctgactcaactcttaaagcagaaacagtacgcccccctcgcagctgaggagcaggttccggtcatctacgctggagtcaacggttttctcgattcggtgcctctagaaaggataggccagttcgaggaggagtttttagcatacttgaagtcgaacgaaaccgaggtactcgaggctatcagagtgaagggccagctatccgatgagctattggctaaactgaagagtgccaccgagtcctttgtcgcgacattctaa

SEQ ID NO: 4216 - DNA, 1212 bp, Artificial Sequence
  Optimized genes for Pichia pastoris
atgagcgaaggaattatagaaatcgacaccaacctgattgagactaattacgatcaggtagtatcgacgtttgacgaactgaatcttaaggagcagattttgcgtgccgtattcgcctacggctatgaatttccgtcggcgatacagtctagggcaattcttccgatagttgcagggcgtgacgtgttggcacaagcccaatcaggcactggtaagacggcgacgttcgctatctccgccttgcagcgactggacgagaagcttaaggctgcgcaagtacttattctagcacctactcgagaactggccctacagattaaaaaggtagtattagctcttgggatgcacttaaatatatccgtgcatgcatgtattggcggcgtggaccctgctcttgacgtcaaagcatttaactctggggtgcagatcgtcgttggtaccccaggacgtgttcaggacatgatagagaggggcgcttttcgaactgaaaacgtgaaaatggtaatacttgatgaagccgacgaaatgctcagtactgggtttaaagaacaaatttacacccttttcacactcctaccttccactacccaagttgttttactctcggctacgatgccacaggaggtgcttgaggttacgacgaagttcatgaataatcctataagaattctagtgaaaaaggaccaactgacgcttgaaggcatcaagcaattctatgtcgacgtcggtgaggagcaatacaagttcgactgtttgtgtgacctgtacgattcgatctctgtgacccaagcagtcatattttgtaacacaaggcgcaaagtggaagagctgactgagcgattgactgcccagaaatttacagtctctgcgatacactcggaattgtcccagacggagcgtgatactataatgcaagagtttaggacagggtcctcgcgaattctaatcagtaccgatttactcgctagaggtatagatgtgcagcaagtcagtctagtgatcaactacgacctaccttcaaataaggagaactacatacaccgaattggcagaggaggccgcttcggacgcaaaggcgtcgctatcaatttcgtcacttccaaggacgtcgaaatgatgaaagagatcgagaaattttacagcacccagattgacgagttaccttcgagcataactgatttgttcgagaccgaagaggtgaacgagtcttga

SEQ ID NO: 4217 - DNA, 801 bp, Artificial Sequence
  Optimized genes for Pichia pastoris
atgctgctcggatttcagaggttccctaagttccatacgttaacacgaaagtccccgataaactccattcggtcactgagatataaattccaaagaccgcttttgaccccgttattcttgtcccccattataaagcaaagcatgaatctggttaccatatctgattcaatacgcgaaaacttgatcaaacatgaggtaattcccgatgtaatcaaggataaatcttttgtccccaaaggactgctgataatttcctatggatcgccagataaggaagtggttctcggtaacacattaaaggtagaggatgcacaaagtatcccgaagattacgtttactgtaaacctgaatgaagagcaggagatcgctagcttttttgacgagaagtttacacttgtagtgacagacccagacgcaccatcccgaacggacaataagtggtcagaattctgtcattatgtcgtgtccgatttgtccctatcaacaaagtccggcacaaccgacgcggaggatcaggtgaattttactaccgatcttaaggtagacaccatacccgagtcggactctaaaactttggtaccttacctgggtcccggaccaccgccgaagacaggtctgcatagatacgtgtttctactttacaagcaaaagccaggcgtgagcttggaggggcccgatcctaagaatcgacctaactggggcacaggtatccccggttctggagtgtctgattgggccgctaagaatagcctgtcgcttttagctgtaaactttttttttgcacagaataaagacaattag

SEQ ID NO: 4218 - DNA, 1038 bp, Artificial Sequence
  Optimized genes for Pichia pastoris
atgactctatctctattgctgcgttcaaccaatatctttcgggctccgaccgccatagagacacaaactcagactacgccagcttttaccgaaccccaagtcctgaagcttaaacaaaatgtccgtaaccctgacagcttggttgcgaatgctgtcacccctgcatttgattggaacacattcgaatttgcgcctattcgtgaatcaactgtgtcgagggcgatgactaagcgatatttcgccgacctggataaatacgcggagtcagatgttgttatagtgggcgccggtagcgcagggctctctgctgcttataccttaggcaaagcccggcctgaccttaagatcgccataatcgagtctaacgttgccgtggggggaggatgttttttaggcggtcaattattctccgctatggttttgaggaaaccagcgcacctttttctaaacgatctgggcctagagtatgaagacgaaggagactacgttgtcgtaaaacacgcggcctactttattaccaccctgtgtagcaaggtactggccctacctaatgtcaagttgtttaacgctacagctgtcgaagatctgctaacccgtaaagacgagaacgggcaaatccggattgcgggggtcgtcacgaattggacactggtgacgatgcatcaccatgaccaaagttgcatggacccaaacacaataaatgccaatgtagtactttcggcaactggacatgatggaccctttggcgcattctgcattaagcggggagtggagattggtgccgtgaaaaaaatggatggtatgcgtggcttggacatgaataaggctgaggatgctgtagttaaaggtgcttctgagattgcaccggggctggtcgtggctgggatggaggttgccgagcattccggtagtaatcgtatgggtcccacctttggggcaatggctctttcaggggtgaaagcggcggaagaggtgttaaaggtatttgacgagcgtaaaaagcaaaaccagcaatgttacggaggattgtccgcttag

SEQ ID NO: 4219 - DNA, 4503 bp, Artificial Sequence
  Optimized genes for Pichia pastoris
atgtataatccttatggaaatggtggatatggtaacgggataccgcagtttcagcagaatgtttaccaaggacaacaacaaccgcaacagcaaccacagcagcaggcgcagcaacaagcccagttccaacagccccaaccgacaggattccagccttcatcatcatttggagtcgggttggtagcacaacaaactggcattcaaccccaggggctgcaaaacaaccctgcaatgttccaacagcaacagtttcaacccggtttacagtcgcaacaaacagggttcaatgcacaagtgatccagtctcaaccaacaggatattcgcagcccacttcctcagcagcgcctacccagaaaggtcatgagctgaaaatacccgcgatcaggctatcctttataacccaacaagaccaagaaaaattcgaacagctgttcaaatcgagcgttccgcctggggaaaatgccatagatggctccacagcgcgagacattttgttgaggagcaacatcccaagctctcagttggcggaaatctggacactttcagacacaacaagatcgggaaaactattgttccctgaatttgccctcgcactgcatctctgcaatgttgtattgcgcggtgagaatctacctttcgagctgcctacaacgctcaaaaatgaggtctcttcgtttgtagacgtcattagcttcggtgtaggagaggaggatgacactcagaacaataacactcccttcagcaacgatttactatctagtgcacaaacatcccagcaaaaccagcagaaccaaccattatcctttcaacaaacgggtttccagtcgagtaaccaggtcccgcaactccctcaaaccagttttggaaatatcggtattcagagtcagcctactggtttgcaaccagtcccagcgcagaaaactggtagcctggtccctgtcgtgacaggaggccttagtgctcaacagacagggttccgccccttgcagtctcaatcaacggggtaccagccccccttacaaaaccaaaccacagggtaccagctgcctctccagaaccaaaccactgggtatcagcccccattacaaaatcagaccaccgggtatcaacccccactccaaaaccaaacaacagggtatcaacagccgctccagaatcagaccacgggatatcaggctcctcttcagagtcagaccacaggttacaagccgttgcaggcccaaaccactggctttcagccaccgttgcaaaaccagacgactgggtaccagcaacccttgcagtctcagaatacggggttccaacagcccttgcagagtcaaacaacaggatatcaaccacttcagagtcaaaccacggggtatcagcagcccttgcagtcccagctcacaggcttccagcagtccctgcaatctcagccaactggactccagccgatgcccaccgggaagcctggccaatggggttttgttgcaacgccgactggaggacttcctggcttagatatgatgcagagtcacttcatgccaaatagcagtacacaactatcccagcttcaacaacccatgaatgcacaatctaacaccaacgttccttgggcgataacaaagaacgagaagcagatatatgacaagatttttaaggaatgggaccaagaccataagggctatatagacggaccatcggcaattagtatcttcgggaaaagcgggctggctcgccaggatcttgaaaagatctggaacctagctgatcaaaataatcgtggcaagcttaacaaagacgaattcgccgtggcaatgcacttggtgtacagaagactcaatggcttagacattcccaacgtcttgccgccggagctcatccctccgtcaagcaagatcctgaaagaatcattaaatgacatgaaaagcaagtttcggcagtcaaacttcgggtcgtcgtccaacaatctttcgaagagtggcagagacggaactcgatttaagaacaatgatgacgatttcggctacaagctgagcattcccgagctgaaaaaattagtacacgagaaacagataattctagatgcgtacgactcccaggacaccgatgttcaaaaacagagcgatcaactaacacagaaaacaggacatgatatcgaaattcttaaggcgaagattaagaatatccaatctgagctgaatgagaaacagccatttgactctaatgcacctggcctcagtaaaagagatcttcgccagagaattgatagtctttccgacaaggtgtcacatattatggatcaaattttcaatgtagaggagcagatacagaacgcgaagattgagcaggcacgcctaaggatagaagaggagaacccttccggcgtggagttgaaagggaccggcccgaacgggataatcaccgagtcggataagcgacacgccaaatccagggcgattctaaagagccggatggccagcctaaccgggaagacggcacctgatataaacgcattcgaggcgaacgaagaaaagctagccgaagaagttgtgcggattaaagcgcagaccactgaaggccgatctttaatcgaggacgtgcaaaattcgattaaggaccttaaggattcggcgttgaattccctggaggagtcggtctcatcagaagtcggatttgagaaatgggagaaagggcaaggtgtcagttcgaaagaagtaaaggaactcattaaactcctaaacgactcgaagcccaaagtcgctccggtaagtgttaaacaagatgtcgtggcggaacaggcgccgtcgaaggtggcgagcgtaccggtcagccaggagagtactggatcatccagtgttgcgtccgagccgcatggcacaccggactcttactcgtcctataagaatccagcggatcgggcgaaatatatcaaggaacaggctgaaaagcgaatgaatgagagactacaaaagctaggcatcagccgcaaggctaagtcgtctagtagcccgcccgtcaaccaatcgtcacctcacgacaaagcggcccagtcgccaatacgatcgcctgtgggaaacgctcaaacttcagaggtaatcaagaaacctaccgcgaccagtagcgataacaatgcagaacgcttaccagagaaagagacgcccgcaaaggagacagtgtcagccaaaaatcctgagtacaaagaggaaagtagcgacgatgacaacgatgaagaactgagaaagctcatggaagagaaggctcgcctagaggagcaacacaaacagaaaaagcttaaaaagaagcaggaacgcgaagcgaagctagccgaactaagaaagcaaatggaggaaatgcgcaaggctgaagagtcagacgatagttgggatgaaaaaacgccctcgcaagtcccaacgcaaccccctcctcgggagactcctgcccaagtccctgttgtcaacattgacagtgtgaagtcagtgccagagaaaccaaaggagatagtccgagagcctgtcccggtagtgcggtcggcgacttcctctgaacacaatcctttttcaaagccgtcgactgacacggcgactcccatccaggtagcatcatcgaacccgttctttaagccacaacagagtgaaccggtagttgatccagttaagatagaagcacagcgtttagcgcaacgtggtgcggtggccaacgatgacgacgatgactggggagactcggatggcaacgactctagtgaaggggaagcaccaacaagaaattcgggcccggctcatctggctagtcttcttttcagaaatggttccttgccgaaggtgccgactaccgaaagctcaagcgaaaagcgggaggtgccagcatcgagccagtcgagtactctcaatttacagcccgaatcgcaggcacaaccaactaaaattgagacaagtaaagctggttcctccgattccgatagcgattctcaatttgggactcccacttctggtgccgccgatgacaccttttctcctcctccaatacccgaggctccacccgtaccgcaagctccgcctatcccacagggaatagccccgccaccggtgcctcagacgtcagcaggcagtttctcgccgcaaattgaggcgtctccagcccaaccagggatcgtgaccaatcactccgggtcatcggttccaccggtgccgcagacttcggtcccggctgcaccaccttcggcccctccccttccacaaacctctgctccacctgcacccccggccccaccgataccacaaacctccgctcctcccgctccgcctgcaccccctgctccgccgataccgcaaatgtcggctccgcctgcgccccctacgccccaaatcgcggcaccttcagcgccgactccacccgcaactctcgggggagggctatcagcgcttctcggtgagatccagggcggtaaggcactccgaaaggtcgacccgagttcacagcatataagtgagggtactacagtgggtcgagtcttgtaa

SEQ ID NO: 4220 - DNA, 453 bp, Artificial Sequence
  Optimized genes for Pichia pastoris
atgcagatcttcgtcaaaaccctaacgggcaaaaccatcactttagaagttgaatcgtctgatactatagacaacgtaaagagtaagatccaagacaaggaggggataccgcccgaccagcagaggctaatctttgcaggaaagcaattggaggatgggcgtactctatcggactacaatatacaaaaggaatctacactgcacctggtactacgtttacgaggaggcggcaagaagaagaagaaaaaaaattatacaacgcccaaaaagatcaaacacaaacataggaaagtgaaactagccgtattaaattactataaagtagacgatgatggcaagatcgaacgattgcgtcgagaatgcgacacctgtggagcgggaatatttatggcaaatatgtctgaccgccaatactgcggcaagtgccacactacaataaaattaagcaagtaa

SEQ ID NO: 4221 - DNA, 1842 bp, Artificial Sequence
  Optimized genes for Pichia pastoris
atggccgatggggtctttcaaggggcaatagggattgatctgggcacgacgtactcatgcgtcgccacatatgacagcgccgtcgagataattgcaaacgagcagggaaatcgagtgactcccagcttcgttgcgtttacgccagaggagcgcctaataggcgacgcggcgaagaatcaggccgcgctaaaccccaaaaatacggttttcgatgcaaagaggctaataggtcgcgcatttgacgacgaatcagtccaaaaagatattaagtcatggccgtttaaagtcgtaaacgataacggcaatcccctgattgaggtcgaatacctgggcgagacgaaacagttttcacctcaagaaatttcatccatggtactaacgaaaatgaaagaggttgcagaggcgaaaataggtcaaaaagtggagaaggcggtcgttaccgtgccagcttactttaatgacgcacagcgacaggcgacaaaggatgcaggcgcgatatccggactcaatgttctgaggattataaacgagccaacagcggcagccattgcctacggattgggggcaggaaagtcagaggaggaaaagcatgtacttatttttgatctgggaggcgggactttcgatgtatcgctattgcatattgctggaggggtctttacggtgaaggccacagccggagatactcatttaggcgggcaggactttgacacaaatttacttgaattctttaagaaagaatttcagaaaaagaccgggaaggatatttccgatgacgctcgcgcactacgcagactgcgtacagcctgcgaaagggccaaacgaaccctctccagcgttgctcagaccactgttgaggtggatagtctattcgatggagaggactttacggctgaaatctcacgtgcgaaatttgaggcaatcaatgcggacctgttcaagtcgacccttgaacctgtggagcaagtactaaaagatagcaaaatcgagaagtccaaggtggacgatgttgtacttgtaggaggcagcacaaggatcccaaaggtccaaaagctcctatccgatttctttgatggcaaacaacttgaaaagtcgataaacccggacgaggccgttgcctatggcgcggccgtgcaaggtgccatactaaccgggcagtccactagcgaggaaacgaaagacctgcttttgttagacgtcatccctttgagcttgggcgtggcaatgcagggcaatgtgttcgcgccggtcgtgccgcgtaatacgaccgtgccaacaatcaagcgtcgtaccttcactacagtggatgaccatcagaccacagtacaattccccgtataccaaggcgagcgagtgaattgcagtgagaacacccttctaggagaatttgacctcaagaatataccacctatgagtgctggagaaccggtgctggaggccatcttcgagattgatgctaacggcattttgaaggtaactgctgtcgagaagtcgacaggaagatctgcaaacataaccatcagcaattcaatcggccggctgtcttccagtgagatcgagaaaatgattaacgatgcagataagtttaaaaaagcggatgaagattttgctaatagacacgaaagcaagcaaaagttagaggcttacgtctcgtcaattgaatccacgataactgacccaatacttagttcgaaattaaagcgaagcgctaaagataagatcgaatcagctctctcagatgcactggctgccctcgagctcgaggatgcatctggagacgatttccgcaaggccgagctagctttgaagcgtgttgtcacgaaggcgatggctacacgatga

SEQ ID NO: 4222 - DNA, 960 bp, Artificial Sequence
  Optimized genes for Pichia pastoris
atggcgacgttgctcaaactgaacaacggattgaaattgcctcaagttggattaggtgtttggaaaatacctaatgaactgacggccgaaactgtatacaatgcaatcaaacaaggctatagacttttcgatggtgctgaagattacggaaatgagaaggaggttggacaaggggttcgccgcgctattgatgaaggtctcgtcaagagagaggatttgttcattgtatcaaagttgtggaataattatcaccacccggacaatgtcggtaaagctttggatcgtacattgtcggatttaggactagactacttagacttattctatatacattttcccattgccttcaaattcgtcccattggaagaaaaatatcctccggccttctattgtggggacggtaacaactttcactatgaggatgtcccgttgttagatacctatagagccttagagcgattggtagacgccggtcgtataaagagcctcggcgttagcaattttaacggggcgttactccaagacctactcagaggtgcccgcatcaaaccagtggcacttcaaatagaacatcacccgtacttagtgcaacaaaaactgattgaatacgcccagtccgaggatattgtagttgtggcgtatagtagtttcgggccccaatcgttcttagagcttaaagtaaataaggccttaactgctgtctcactattcgaacatgacgtgataaagaagatagcccaggctcataataggagcgcgggtgaggtactgctgcgctgggccactcaacgaggattagccatcatacccaaatcgtcaaaaccagagagattatcaagcaatctacatatcaattcctttgacctcactaaggaagatctggagacgatatcatctttggatctcggactacgctttaatgacccatgggactgggataaaattcctattttcgcatga

SEQ ID NO: 4223 - DNA, 666 bp, Artificial Sequence
  Optimized genes for Pichia pastoris
atgagtgagacctacgacgaacaggtcgtagcggagccggtggaagtccaatacgttgaactaagcactaagatacctgcagacattagagaaggtgcagaggaaattaaattatttaacaagtggtcgttccaggatgtgaccgtcaaagacattagcctaaccgactacattcaaatccgtcaaccagtcttcgtctcgcacacggcaggtaaatatgcagctaagcgctttcggaaagctcagtgcccaatcatcgaacgcttaacaaatagcctgatgatgaatggtcggaataacggtaagaaactgcttgctgtccgaatagtcaagcatgctttggagatcatacatgtgcttactgatcagaacccgttgcaggtactagtagacgcgatagttaacaccggagccagagaagacagcaccagggtcggatcggcgggcgcagtacggcgtcaagctgtggacgtgagcccgctacggcgtgttaaccaagcaatcgcgttgcttacaatcggcgcgcgggagagcgcgttccggaacattaaatctattgcggagtgtcttgccgaggaactcataaacgcggcgaaggggtccagtacatcatacgccatcaagaaaaaagacgaattggaaagggtcgcaaaatcaaacaggtga

SEQ ID NO: 4224 - DNA, 1449 bp, Artificial Sequence
  Optimized genes for Pichia pastoris
atgtttgctcgtttacacgctaagcggggctggaagtcgctagctcgtgccagggtggggtcccgtttcctgtccaatagcagtattgcgcgtgctgcccaaacgaaagacaataatgacttctacgacgtaaaaactaagaagaacgatttttttcctgttcaggtcgatggaatcgaatcttcactaggcaaatacgaggaattcgccaaggacgctcatgagtgggagagctggaatctacaaaacgaagaccacccggagtacccggtaaaacgaaccaaaatacgacattttacacttaatttcggtccccagcatcctgctgcacacggggtcttgcggctgattctagaacttcatggggaggaaatcctcagatccgatccacacgtaggtctgttacaccgaggcactgagaaacttatagaaagtaagacctacatgcaagcactcccatatttcgatcgcctggactatgtatcgatgatgacgaacgagcaggtgttttctctggcagtagagaagctattaaacttagaggtcccggagcgcggccagtacatcagaacgcttttcggagagataaccagggtgcttaatcatcttatgtctgttttgagccacgcaatggatgttggggctcttaccccctttttatggggctttgaggagcgggaaaaactgatggagttctacgaaagggtctcgggtgcgcggctccactccgcgtacgtgcggcccggcggtgtgtctcaagacttgccggcggggctgttagatgacatttacatgtgggccactcagttcggtgaccgtttagacgagacagaggagctgttaactgattcccgtatatggaaacagcgaacgatcggcataggagaggtgacggcagaggacgccctgaactacggcctgagcggtgtaatgctccgtggctcaggggttccgttcgatatacgtaaaagtcagccgtacgacgcgtacgacaaagtagatttcgatatagctgtcggcacaaagggggattgttatgacaggtacctaattaggatgacagagtttaggcaaagcctaagaataattgagcaatgttgcaaccaaatgccccctggaccagtcaaggttgaagactttaaagtagctccgcccccacgtgccttaatgaaggaggatatggaggctcttatacatcacttcctcctttatacgaaagggtacgctgttccagcaggcgagacatatacggcgattgaggccccaaagggggaaatggccgtttacgtcgtatcagatggttcagagcgtccttatcgctgtaaaatccgagctcccggttttgcccatttaggtgcttttgatcacatagcacgtggtcatttcttacctgacgcagttgcgataattggcacgatggatctggtctttggtgaagttgaccgttaa

SEQ ID NO: 4225 - DNA, 2517 bp, Artificial Sequence
  Optimized genes for Pichia pastoris
atgatagatgaaaaacagttaaaccagcccaagcgcagcgtgttacgtcggctgcacatgctatttctccccttgttggcaatttccttctttctaatttacttaagtgatattacccaaccactcttccgggcgcgtaaggaggacgagaatcctcttgagatctatcttaaagccctagaaaccaatgaagcacataagtggagcaaagtatatacctctcaacctcatctggcgggtaccaattatgggctagtcgaatttaccaagtccaagtttgaggagtatggatttgaggcctcggttgacgattacgatgtgtacttgagttaccccattgaccacagcctggaactttacgagcactctgaggataagaacgacaaactcctttataaagccagcctacaagaggacgtgttgtctgaagatccaacaaccagtggcgatgacttaatacctaccttcctggggtacggtgcaaatggaaatgtctcggctgagtatatatatgcgaactatggaacaaaagaggacttcgaagacctggtagctcgtggagttccaattaaaggcaaaattgccgtgatacgctatggtcaaatctttagggggttgaaggtgaaattcgcgcaggaatacggtgctataggcgctgtcatttattcggatcccggggatgattacggtattacgccggagaatgggtataagccatacccacacgggaaagcccgaaacccctcatccgttcaaagggggtcggcgcaattcctatcggtatacccaggcgaccccaccactccgggcgtgggatccaagaaaggagtcgaacgtgtggacccgcacgcgacaactccctccattccggtacttccgctaagctttaaagatgcgctgcctattcttaaaaaacttaacaaggagggtctttccgtgcctgatagttggaagggaggactcgagggggtagattattcgacgggtcccgccaaaaatattcatctcaacctctattcggaacaaaacttcaccattactcccatttataacgtttacggcgaaatcaagggtgagaacgccgatgaggtcataattataggaaaccaccgggacgcatggataaagggtggtgcgtccgaccctaacagtggttccgccgctttaatcgaattgtcaaggggtttgcatgccctaacgaagacgggttggaaacctcatcggacgatagtattggcaagctgggacgcagaggaatacgggctgatcggatcaacggaattcggagaacaatttgaaaagttcctacaaaaaaaagttgtcgcctacttgaatgtcgatgtagcagttgccgggacacacttacacctaggagcgagtccctcgcttttcaaactgttaaaagataatgctaaggagattacattcaaaaattctactgagactctatatgataattacgttaaggaccacggaaacgacatcataagtacgctaggtagtggatcggattacaccgtgttcctcgatcacttaggtatcccgagtcttgatattggctttattgcaggaaaaggtgatcccgtctaccactatcactcgaattacgactcttaccactggatatcaacttctggggaccccggatttgagtatcacaatgtgttggctaagtatttggggtccctagtgttaaatttgtctgaacgcgaagtcttgtatctgaaacttcatgattatgcgaccgaactcctgaaatatttgttagaggcttatgctcagatgccggaggagtgggatgatgaagtaattggtttccgcagtagttcttgccatcgggcgaaagcatcgcaccatgggaaagacccgcaccatgaaggtcgtagacatcacggcaagggctttcattctaagggcggcccccaccacggagaaagacaccatggaaagggatttcacgctgaaggcggacctcatcatgagaagggtcctcaccatgagaaaggattacatgtagaaggtgaaccacaccatcaaaagggtccgcacttcgaaaaggggtttcaccatgacatggagatgtaccacaaaaagttggcgcatcatggaaaagaaccaaagactaaattaaaacacctaaagaagcaagtcgaatccttaatcatcgactttgctaatacaacccagacgtatgacgcgtatacagactttcttcagaagcaacatgagattcgcgattcgcttagtttttgggagaagatcaaactacattttaaaatcaaggcggccaattttaaactgaaatatttcgagcgcgtctttttgcatgaaaacggtcttaagaaccgggagtggtttaagcacattgtctatgcggccggtcggaataccggatatgcgggtcagcgattgccaggtctggtagaggcaatagaggataaaaacttacatgatgcagttaaatggcttcacatactgtccaagaagatcgattccttacaaaaatctctggagtaa

SEQ ID NO: 4226 - DNA, 2667 bp, Artificial Sequence
  Optimized genes for Pichia pastoris
atgagcacagccgcacccatcaaggaagaaagccagttcgcccatctcaccctcatgaacaaggatattcccagcaacgccaaacaagcaaaaagcaaagttagcgcagctcctgccaagacgggatcgaaatcagctggcgggtcaggcaacaataatgctgcaccggtaaagaagagggttcggactgggtgcctcacctgtcgaaaaaagcacaaaaagtgtgacgaaaaccgaaacccaaaatgcgacttctgtacattgaaaggtttagagtgcgtttggccagagaataataaaaaaaacatattcgtcaataatagtatgaaggacttcctgggtaaaaaaaccgtggacggtgcagatagtctgaatctagccgttaatttgcaacagcagcaatcttctaacacaatcgcgaaccaatcgctgtccagcatcggcctggaatctttcggctacggctctggcattaaaaacgaatttaactttcaagaccttattggtagcaatagcggatcttctgaccctacgttttccgtagacgctgacgaagcgcaaaagttagatatatcaaataaaaattcgagaaagagacaaaaactagggctgttaccagtgtcgaacgccacttctcaccttaacggcttcaatggtatgagtaatggaaaatcgcacagttttagttcgccctcaggaacgaatgacgacgagttaagtgggctcatgttcaactcgccttcttttaacccgttgactgtgaacgactcaaccaataattccaatcataacataggcctgtccccgatgagttgcttattttctacagtgcaagaggcgtcgcagaagaaacacggaaactccagtcgacatttctcctaccccagtgggccggaggacctttggttcaatgagttccagaagcaggccctaacggccaatggagagaatgcggtccaacagggtgatgacgcttctaaaaataataccgctatccctaaagatcagtcgagtaattctagtatattctccagcagatcatctgctgcctctagcaatagtggagacgacattgggagaatggggccattttcgaaggggccagagattgagttcaactacgactcgtttctcgaatcccttaaagccgaaagcccatcctcttcaaaatataaccttcctgaaaccctaaaggagtacatgactctgtcctcaagccacttgaattcacagcattccgatacattggcgaacggcacaaacggaaattactcgtctacggtcagcaacaatttatcgttaagtttgaacagcttttcattctcagataagttttcgctctcaccgccgaccataacagacgctgaaaagtttagtttaatgcgcaactttatcgacaatatttcaccatggttcgacacgttcgacaatacaaaacagttcggcacaaagatacctgtcttagcaaaaaagtgcagcagcttgtactatgccatattagcgatctcatcacgacagagagaacggattaagaaggaacataacgagaagaccttgcagtgctaccaatattccttacagcaactcattccgacggtccaatcctccaataacatcgaatatataattacctgtatactactcagcgtattccacatcatgtcgtcagaaccctccacccaacgagatatcattgtttccttagctaaatacattcaggcgtgtaatattaatggatttacatctaatgataagctggaaaagtctatattctggaactacgttaatttggatctggcgacatgcgcgattggagaggaaagcatggttatacctttttcgtactgggtaaaagaaacgacggattacaagacaatacaggatgtgaagccttttttcacaaaaaaaacctccactacaacagatgatgacttagacgacatgtacgcgatatatatgttatacatttcgggcagaataattaacttgctaaactgtagggacgcgaagctaaattttgagccgaagtgggagttcctatggaacgagcttaatgaatgggaactgaataaaccactcacgtttcagtcgattgtgcaatttaaggcgaacgacgagtcgcagggtggcagtacctttccgactgtacttttctccaatagcagatcatgctactcgaatcaactttatcatatgtcctatatcatactagtacagaataagccaaggctctataagattccattcacgacagtatcagcctctatgagctctccaagcgacaataaggcgggcatgtctgcaagtagtacccccgccagcgatcaccacgcttccggcgaccatctttcgcctaggtctgtcgagccctcactaagcacgaccctgtcaccgccgccaaacgcaaacggtgcgggtaataaatttagatccactttgtggcacgccaagcaaatttgcggaatctctataaacaataaccataactccaaccttgctgctaaagtaaattcgttgcaaccactatggcatgccgggaaactaatatcatccaagtcggaacatacacagctcttaaagctcttgaataacctcgaatgtgcgaccggttggccaatgaattggaaaggaaaagagctcatagactactggaacgtggaggaatag

SEQ ID NO: 4227 - DNA, 315 bp, Artificial Sequence
  Optimized genes for Pichia pastoris
atggccttattcgattctattagcaatgtagtcaaagaccaattaaaggacaaggaggcatcatcgaaggacacaagtgcaaccgaggcctcgaccaaaggggaagaaccgaaaaaaacggaggaggctaaaaaacaagagattgagggatatactcaagatctgaaagatatcgctgcagccgtgcagaagggcgatttcaaagggatccaaaaggaggtatcggaattggcgggcaataagcagtttcaagcagatgccaaagagtacgcctcaaaagcattcagcaagaaagaaggtggcagttcggcctaa

SEQ ID NO: 4228 - DNA, 1827 bp, Artificial Sequence
  Optimized genes for Pichia pastoris
atgagttctaagcactgggattataagaaggatctagttttgagccacctcgccgggttatgtcagagtaacccacatgttagattgattgagagcgaacgtgttgtcatcagcgctgagaaccaggaggataagatcaccctaataagcgggggtgggagtggacacgaaccacttcacgctggattcgtcacgaaagatggactgttagacgccgcggtggcggggttcatattcgcgtcgccatctactaagcaaatcttttcagctataaaagcaaagcccagtaagaaaggaacgttaattattgtaaagaactacacgggtgacatacttcatttcgggctcgcggccgaaaaggcgaaggcggaaggtctgaacgctgagttgctaatagtacaggatgacgtgtcggtaggtaaagcaaagaacggccttgttggcagacgtggcttagccggaacctcactggtgcataagattctcggagcaaaagcttacctgcaaaaagacaatttggagctgcatcagttagtaacctttggggagaaggtcgttgcgaacctggtaaccatcggtgcgtcattggatcatgtaacaatcccagctcgcgcgaacaaacaagaagaagatgattcggacgacgagcacggttatgaagttcttaagcatgatgaatttgagatcggaatgggtatacataatgaaccaggcataaaaaaatcgagtccaattcctacggtagatgaactagtagcagagttattagaataccttttgtcaaccactgacaaggaccgtaattacgtgcagttcgataagaatgatgaggtagtgctcctaatcaataatctgggcggtacctctgtgctagaactatatgcaatccaaaacatagtggtggatcagcttgcgagcaagtatagtataaagcccgttcgcatcttcacaggaacgttcactacatccctggatgggcccggtttctcgatcacgttattaaatgccaccaagacgggtgacaaggatattttaaagttcctggatcacaaaactagcgcacctgggtggaactctaatatttcggactggagtggtagggtcgataacttcatcgtggctgcacctgagatcgacgagggcgactcatcgtccaaggtcagtgttgatgccaagttgtacgccgacttgctggaatcgggtgtgaaaaaagtgatctcaaaagaacccaagatcacactttatgacactgtagcgggggatggagactgcggggaaacgcttgctaacggctcgaacgccatcctgaaggcgcttgccgagggcaagctggatttaaaagatggcgttaagtcactcgtacagatcaccgacatagtcgagacggcaatggggggcacatcaggggggctctactcgatctttataagtgccctcgctaaatccctcaaagagaaagaactttcggaaggagcctacacattgacgttagagacaattagtggctcactccaggcggccctgcaatcactgttcaagtacacccgcgcgcgtaccggcgacagaacgcttatagatgctctggagccttttgttaaagagtttgctaaaagcaaagacttgaagctcgcgaacaaagccgcacacgacggggcagaggccaccagaaagttagaggctaaatttggtcgtgcgtcatacgttgcagaggaagagtttaaacaatttgaaagtgagggcggcctacctgatcccggagcaatcggattagctgctctgatttcggggattacagacgcttatttcaagtccgagacgaaattatag

SEQ ID NO: 4229 - DNA, 1062 bp, Artificial Sequence
  Optimized genes for Pichia pastoris
atgtcgaataacacaacccaaaatctggctgaacagaaaggtatccaaacggatcttgtgacgttaaccaggttcatccttgatgagcaaaagaaatccgcgcctaacgcgaccggggagctaaccctgttgctaaacagcctccaattcgccttcaagttcattgctcatacgattcgtcgttctgaattggtcaacctaattggcttggcgggggtgaccaacgcaacgggcgacgaccaaaaaaagctagacgtgatcggtgatgaaatctttattaatgctatgaaggggtcggggaatgtaaagcttttggtctcagaagaacaagaagatctcatcgtgttcgagtcctcgaaaggcaactacgcggtggtttgcgaccctatcgatgggtcaagcaacctcgacgcaggtgttagcgtcggaacaatttttggggtctacaagctgctcccaggctccgcgggctccattaaagatgtactgaggtcaggcacggaaatggttgcggccggctacactatgtatggagcatcgtcgcacctcatgctgaccactgggaacggagtgaatggctttaccctagacacagacctaggcgaatttatcttgacctaccccagtctgaagatcccacacacaagggcaatatatagtataaatgagggcaatagccattattggacagatggcgtcaatgagtatatagcttccctcaagaaaccacaggccaacggcaagccatactcggcgcgctacattggaagtatggtcgccgatgtgcatcgtactctactctacgggggcatctttggctacccagctgattcgaaaagtaagtcaggcaagctgagagtgttgtatgagtgctttccgatggctctcttgttggagcaagctggcggggaagcagtaaacgataaaggagagcgcatattgaacctggagccaaaacaagtccatgagcgaagtggtatctggctaggctcaaaaggggaggtcgaaagactcctgccatacctcactaagaaaataaaaatccagtcggttaatctttga

SEQ ID NO: 4230 - DNA, 1095 bp, Artificial Sequence
  Optimized genes for Pichia pastoris
atgaaagctcttattctagtgggggggtatggcactcgcctacgccctttaacactcagtgtcccgaagcctctcgtggagttcgcaaacaaaccaatgatcttccatcaagttaaggcgctcgcggaagcaggcgtcaccgatatagttcttgctgttaactataaacccgaagtaatggtgggagccctgcgggagtatgaaaaagaatgcggagtcaacataactttttctgttgaagaggaaccgttaggaacagccggccctttgaagttagcggaatctgtgcttactaaaaatgatgaaccaatatttgtgcttaacagcgatgtcatatgcgactacccatttaaagacctggctgcgtttcacaaggctcacggggctgaggcgactattgtagcgacgaaagtggacgaacccagtaaatacggggttatagttcatgacagggacatacctaatctgattgaccgctttgtggaaaaacctgttgagtttgtagggaatcggattaacgccgggatatacataattaatccatcagtaattagcttgatagaaatgcggcccactagcatagaaaaagaaaccttccctctacttgtcgagaagaaacaactgtacagctacgaccttgagggttattggatggatgtgggtcaacccaaagacttcctcagtggtacgtgtttatatctttcatcgctagctaaaaaagaacggtctgcattgactcctacaagtgagcctttcattaatggaggaaacgttctcatcgaccccactgcaaaagtcgggaaggactgtaagataggcccaaatgttgtgataggaccgaattgcgtaataggagacggcgtgagaatccaacgcagtgtcatcttaaaaaattctaacattaaggatcatgcgtgggtcaaaagcacaatagttggctggaacagcacggtagggaagtgggcccgtctcgagggtgtgacggtattaggagaggacgtaacggtgaaagacgagatttacgttaatggaggaaaggttcttccccacaaaagcatcagtgcgaatgtagacacgccgcagattatcatgtag

SEQ ID NO: 4231 - DNA, 1098 bp, Artificial Sequence
  Optimized genes for Pichia pastoris
atgaagatcgtattggtgctttattcagcaggcaaacatgcagctgacgaaccaaagctctacgggtgtattgaaaacgagctaggcataaggcaatggctagagaaaggaggtcatgaacttgtgacgaccagtgacaaagaaggtgaaaactctgaactagagaagcatatccccgatgctgacgtgatcataagcacaccgtttcatcccgcatatataacgaaggagcgcattcagaaggccaagaagcttaaactcctggttgtcgccggggtaggcagtgaccatatagatcttgactacatcgagcagaatggtcttgatatttcagtcttagaggtgacggggagtaacgtagtatccgttgcggagcatgtagtgatgacgatcttgaatctggtccgcaacttcgttccagcgcatgaacaaattgtgaatcatggctgggatgtcgccgcgatcgctaaagacgcctacgacattgaaggaaagaccatcgctaccataggtgctggtcgaatcggctatagggtgctggaacgattggtggctttcaaccccaaggaacttttgtactatgactatcaggggctcccaaaagaggctgaagagaaagtgggagcgaggagagttgacacagttgaagagcttgtggcccaagccgacgtggttactgtcaatgctcctcttcatgcgggaaccaagggactcgtgaacaaagagctcctgtctaaattcaagaagggcgcatggctagtaaacacagctcgcggagccatttgcaacgcacaggacgttgcggacgccgtagccagcggccaattgcgtgggtatgggggcgacgtgtggttcccccagcccgctccgaaggaccacccatggcgagacatgcgtaacaagtatggttacgggaacgccatgactcctcactactcgggaacaacgttagatgcgcaggtccgctatgctgaaggcactaaaaacattttaaattcttttctgaccaaaaaatttgattaccgaccacaggatgtaatactcctaaatggaaaatataagacaaaggcgtacggtaacgacaaaaaggtcgcttag

SEQ ID NO: 4232 - DNA, 747 bp, Artificial Sequence
  Optimized genes for Pichia pastoris
atggcaagaacattctttgtcggtggaaattttaaaatgaacgggagcaagaagtctatacacgaaataattgagagactaaacaataccaaattgcctgaaaacgttgaagtggtgatagcacccccagcaccctacctccagcaggccgtgacagaaaacaagcagaaaaccgtgtacgtatcggcccagaatagcttcgacaaagcgtccggtgcctacaccggtgaagtttctgtcgaggcgttaaaggatttgggtgtgccatatgtgattctcggtcattcagaacggcgaacgattaacaaggaggacgatgcatttatagcaagcaaaacgaaattcgcgcttgatcaaggattaaaagtcatactctgtatcggggaaacactcgaggagaagcaagcaaatataacattagatgtagtgaaacgccagcttcaggccgtcgtcgatgtcgtctccgactggactaacatagtggttgcgtatgagccagtctgggctatcggcacgggtctagcagcaacaccgtccgacgcccaagacgtccataaacagattagggatttcctagcaactgtgattggaaaagatcaagcggagaaagtaagaatactatacggggggtctgttaatgggaagaacgctgtggaattccgggacaaggcagatgtagatggttttttagtgggtggggcttcacttaagcctgagttcgtcgacatcataaattctcgtaattag

SEQ ID NO: 4233 - DNA, 1029 bp, Artificial Sequence
  Optimized genes for Pichia pastoris
atgatcgtgcactcacccatagttacccgcaggctagccacatcggcccgtgtccctatccgcacgctagctacttcttcgaatggactaaacttcttccagaagactcaactcccagcgaacacgatcatccgttttgttcctcaacagacagcttggatcgttgaaaggatgggaaagttccaccgcattctccagcccggcctggctatcctcttaccgttcctcgataaaatacaatatgtccagtcgcttaaggaaaatgctatcgaggtacccagccagtcagcgatcacaagcgataacgtaacgctggagatggacggggtcctttatatccgtgttgtagatgcatacaaagcgtcatatggcgtcgagaacgccgaatatgcaataagccaactcgcgcaaaccactatgcgttccgaaatcgggcaattaacactggatcacgttttacgtgagagacaaagccttaacgttaacattaccgccgtccttaacgatgcagcgaaagattgggggattcaatgcttgcgctacgagattcgagacatccacccccccagcaacgtgctggaggctatgcatcggcaagtctctgctgagaggtcgaaaagagccgagatactggatagcgagggccaccgccagtcggcaataaatattgcagaaggggaaaggcaaagtcagattttagcaagtgaggctacaaagttcaagcaaataaacctcgccgagggtgaggctagggcaattcttctgaaagcggaagcgacgtccaaggggattgagcagatcgcgaacgctatacgtaatacgccgggagggggagacgctgtttccttgcaggtagctgaaaagtatgtcgacgcctttggtaagctagctaaggagagcaatacgatcgtgattcccgctgggctcggcgacgtatcgtcatggatggcttcaggcctttcgatttaccaaaacttgcaaaaatcgaacgccacgaaagaccaaaacaaaattgaggaaacaaaatag

SEQ ID NO: 4234 - DNA, 1548 bp, Artificial Sequence
  Optimized genes for Pichia pastoris
atgagcttagtgcaggaactaattcagaagataagctcactagagctgacattggttgaaaagctatcaattctcttcgtggctccattcctcttgaacgcactatggcagttcatatactcgtttcgcaaggacagagtaccattagtcttccattgggtgccatgggtcggctcggcggtgacgtacggtatgcagccgtacgagttttttgcggactgccagcgcaagtacggtgacgtttttgcgtttgttcttctggggaaggtgatgacagtatatctcggtccgaaaggacacgaatttatattgaatgcaaaacttaacgatgtatgcgctgaagatgcttacaagcatctcactacacctgtatttggcgagggagttatatacgattgtcctaattggaaattaatggatcaaaagaaattcgtgaaggggtcgctaacaaaggagtcatttagatcgtacgtacctaaaatacgggatgaggttctagattacatcaacaatgatccgaactttatgggaggagacagcaagaaaaagaccgggaagaccaatgttcttaattctcaatctgaattaactattttgacggcgtcgaggagtctactaggtgacgacatgcgaaagctacttaccaaaaagtgggcgaaactcttctcagacctagacaaagggttcactccactaaacttcattttctcgcacttacctcttccctcgtactggacccgcgaccacgcccagaaaacaatttctgagacttacctaagtctcattaataagcgacgcgctactaacgatataggtgaccgagacctcatagattcgcttatgaagtcgtcaacatataaggacgggtctaagatgaccgatgaagaaattagtcacctgctgatcggagttcttatgggaggccagcatacaagcgctagcactagcagctggtttttgttgcatttgggtgaaaagcctgaactgcaagaggagttattcgaggaacaagaacgcgtgttacaggggcgtgagttgacttatgatgatctagccaatatgccactccacaatcaggtgataaaggagacattgcgcatgcacatgccgctccactccatctttcggaaagtcacgcgtccacttccggtacctaactccaaatatgtcgtgcctaaaggccattatgtacttgtttcacccggcttcgccatgacaaacgatgcctactttcccaatgcttcagactttcaaccacatcgctgggatgagacggtagaaccagtatcagcagatgcgaaggagacggtggactacggcttcgggaaagtttctaaaggagtgagtagcccttacctaccctttggcggtggacgtcacaggtgcatcggtgaacatttcgcctattgccaactaggcacgattttgaacactttcgtaagaacattcaagtggaaagccgttgtacctcagccggattacacttccatggtaactctcccagaaccgaatttgagcaccatcacatgggaacgacgagacaactaa

SEQ ID NO: 4235 - DNA, 1671 bp, Artificial Sequence
  Optimized genes for Pichia pastoris
atgaccttatcgaacaatacgaagcggagagaatccagtataacccctgaccagcaaaagctaatcgagaagtatcttgaaaagaagaatgttcatcatcaaaaaaaattgcaacacgtaacacataccagcacaaacgtcaatctctcaagtatcaagtggaaaagccttcggctcgaagattgtggtgttagtataccagattctggcctccccgcgaagatagcctacgagtccatccatgattcactaaacttagatggcaacccgactttgaatttggccagcttcgtaaataccggttacattaatgattatagtgagccactaattcatgaaaatctagtaaagaacctggctgacaatgatgagtatcccgtaatgctcgaattgcatgaacgatgtctccagatgttgaccgaactttggaacggtgattcgaaaaaaagtatcggatcagcaacgactggtagctccgaggccatcatgctggggggcttggccatgaagaaaaactggcagacaaagcgtcgagcagctggaaagtctacagaaaagcctaacattatcatggcctcgtgttgtcaagtggctttagaaaaatttgctcgatatttcgaggtagatgctaggattatatcttgtgataataacgattatattctcgactacgaccttatttatgatgcatgtgatgaaaatacaattgggatatttgtaatcttgggttctacgtatacaggagcgttcgaagatgttgcgttagttaataagatcctcgacagggtggagaaggagaaaggatttgatatcccaatccatgtggacggcgcttcgggtgccttcgtagctccgttcatatatcccgacctagaatgggattttcgggtccccagggtcaaaagcattaacacgtcgggccataagttcggcctagttactgcagggttgggatggattgtcttcaaggacaaggagtggcttccgaaggacttggtgttcgaactgcgataccttggtgggttggaatactccttcactctaaatttctcacgtccaggtcaccaggtcattcatcaatattttaattttgtagcgcttgggaaaaatgggtactcgagtatttttgacacctgcctaactaatgctcgcctactgagttcgttcttagaagaaacgaactactttaaagtcgtctcgaacgtccatcgtccggtggaagcaggaaccactccccacgccgatgaccatttagcctttcatccctctttgccggtagttagctttcagtttaacgaagagttttctaagcaataccccgagataccacaaagcatcataagtacattaatgcgcaacaagggatggataataccaaattacccgttgccgcgaacgactaaaccggtgaaggatgacgaacgtgaaatattaagggtggtagtccgctacaacctcactttagagttgttacagaaactaatgtcggacattgtgagcacacttacagtactcacaaactcgtgtaagctaataagggagtctttgaataatgacgcattggaagacacagatatcatttatgacatgctactatcaatcgcattggacgggagcgagaacctcgtaaagtcgagcattaaagaccataagcacgctggcgcttgttag

SEQ ID NO: 4236 - DNA, 1140 bp, Artificial Sequence
  Optimized genes for Pichia pastoris
atgtcgacagaaggtcagataataaagtgcaaagccgcagtcgcatgggaagcaggtaaggatttatccatcgaggagatagaggtgcttcctccgcgagcgcatgaggtaagggtaaaggtggagtttacgggagtgtgccataccgacgcatatacactaagtggggcggatgcggaaggctcgtttccggtggtgtttgggcacgagggggccggggtggtcgaaagcgttggcgagggtgtggagagtgtaaaagtaggtgattcggtcgtgctcctatatacaccagaatgcagagagtgcaaattctgcctgagcggcaagacgaatctttgcggcaagatccgtgccactcaaggtaaagggttgctgccagatggaactagccggtttcggtgcaaaggcaaggacctgtttcattatatgggatgtagttcattctcacaatacaccgtagtggcggacatctccgtagtaaaggtgcaagatgaggcgccgaaagacaaaacctgtctgttgggttgcggcgtaacaacgggttatggggccgcgattaacactgctaagatctctaaaggagataagatcggagttttcggggctggatgcataggattaagcgttatccaaggggccgtaagcaagggcgcttccgagataatcgtcattgatatcaatgactcgaaaaaagcgtgggcagatcaatttggggcgactaaattcgtgaatccgaccaccctcccggagggcactaatatcgtagattacctgatagacatcactgacgggggatttgattatacatttgactgtaccggaaacgttcaagtaatgaggaatgcactggaatcatgccataaaggctggggggagtccatcataattggtgtcgccgcggccggaaaagagatatctactagaccgttccagttggttactgggagggtctggcgaggatgtgcttttggtggcatcaaaggacggacgcagatgccgtccttggtgcaagactacctagatgggaaaattaaagtcgacgaattcatcacacaccgccacgacttggacaacatcaacaaagcgttccatgacatgcacgccggaaactgcatccgcgccgtaattactatgcactga

SEQ ID NO: 4237 - DNA, 399 bp, Artificial Sequence
  Optimized genes for Pichia pastoris
atgtccgaaacttcagccccccgacctacaattgtgaaaaagtacacaaagaagtttaagcgccaccacagcgatcgctatcacagagtaggcgagtcatggcggaagcaaaaaggaatcgatagttgtgtccgaagacgttttagaggaacgattaggcaacctaagatcggttatggatcggataaacgtacaaaatacatgctgaagtcaggccacaaggcatttgttgttaacaacgcaaaggagctcgatgtacttcttctgcacaatcagcagtacgcagctgagattgcacacgccgtttccagcaagaaccgggtacatattcttgcacgagccaaggaacttggtatcaaggtgaccaaccctcaagggcgactaaacttggaggcctag

SEQ ID NO: 4238 - DNA, 651 bp, Artificial Sequence
  Optimized genes for Pichia pastoris
atgagtcaggggactatttatcttgtgttggcctccccgcgtagttccttgtttaaggacctgattgaatactacggcttagacatcaaaataagtgatactagtgaccctgaatttgcaaaaacgttccctttaaagcgaacccccagtttcaagggtccagactttgtactgcatgaggctcttgccattttcgtttacataacttcccttattcctcaaaatcacggattgtacggaagctcgaacctcgattacgcccagactattaaatggttgtcatttacggcgtccgaaataatctctggactggtacaggcactataccccctcatcggaaatttgccctattcaaaagacggggtggatcaagccctaaaggacctagagagttacgttgctgtttacgaaacgcaattgaaacagacaaaataccttgttggggataaaataacattagccgatctctttgcggtccagagtatccggtgggggctacaatacatctgggatgttaactggttaaaacaacatcctctgatagacgcctggtttaaagatgttactcagcaccctatcatagtaaaatccttaggcgacttcaaaccactacagaaagcattgcctaatgcaccccctaagggaaactga

SEQ ID NO: 4239 - DNA, 1233 bp, Artificial Sequence
  Optimized genes for Pichia pastoris
atgatttttgatggcacaactatgagtattgccataggcttattgagcactttaggcataggcgctgaggcgaaagttcattcagcaaagatccacaaacatccggtctcagagacactgaaagaagcgaattttggccaatacgtaagcgcactagaacacaagtatgtttcattgttcaatgagcagaacgctttgtcaaaatcaaacttcatgtcccagcaggatggctttgctgtcgaggcgtctcatgacgcgccattgacgaattatctcaatgcgcagtactttacagaggtaagtttagggacccctccgcaatccttcaaggttatcttggacacggggagcagtaatttatgggtaccctcgaaggactgcgggtcgcttgcttgttttctgcatgctaagtatgatcacgatgagagttccacttacaaaaaaaacggttcttcattcgaaatacgttacggctcaggttctatggaagggtatgtatctcaggacgtacttcagataggagacctcactatccccaaggttgatttcgctgaggcaacgagtgagcctggtttggcatttgccttcggaaaatttgatggaattcttgggctggcctacgattcaatctcagtgaataaaatcgttcccccgatttataaggcccttgaattagacctgttagacgaaccaaagttcgcattttatctaggagatactgataaagacgaatcggacggaggtttagctacgtttggcggtgtcgacaaatccaaatatgaaggcaaaattacgtggttgccagtccgccgcaaagcatactgggaagtatcgtttgacggagtagggcttggttcggaatacgccgaacttcaaaaaacaggtgctgccatcgacaccggcacaagtctaattgcgttacccagtggcctcgcggagatcttgaatgcagagataggtgccacaaaaggctggagtggtcaatacgctgtggattgcgatacacgcgatagcttacctgatctcacacttacgtttgcgggctataattttactatcactccttatgactatactttggaggtttctgggtcatgcataagcgcgttcacgccgatggatttcccggaacctattggtcctctagctattataggcgacagcttcctgcgaaaatattactcggtatatgatctggggaaggacgccgtcgggctcgctaagagcatatag

SEQ ID NO: 4240 - DNA, 804 bp, Artificial Sequence
  Optimized genes for Pichia pastoris
atgctcacgcacactgtgttgagagccgggactaaaagaacgtgttccacgctctcagtcgtccgcggcttggctacggtgtcgcaaaatcaaccgcgcttaaaaagctttaaggtgtatcgctggtccccggacactccagagataaaaccacacatgcaagagtacaagatcgacctcaatgagtgcggcccgatggttttggatgccctattaaaaattaagaatgagcaggacgcgacgctaacatttcgccgctcctgtcgcgagggtatttgcggttcatgcgcaatgaatatcggcggtcggaatacgcttgcctgcctttgtaaaattgaccagaacgaatctacagaactcaaaatttatccacttccacatatgttcgtagtgcgtgacctagtcccggaccttacccacttttacaaacaatataagtctattcaaccgtttttacagcgggactccgtaccatctgacggtaaagaaaatctacagtctatcgaagatagaaagaaattggatggtctctatgaatgtatattgtgcgcgtgttgcagcacatcttgtccgtcttattggtggaatcaacaagaatatcttggaccggctgttttaatgcaggcatatagatggctaattgacagtagagaccaagcttcagtagcccgaaaagagatgttacagaactcgatgtccttatataggtgccacaccataatgaattgtgctcgaacatgcccaaaggggctaaacccgggcaaggcaatcgccgagatcaaaaagcagttagcatttgactaa

SEQ ID NO: 4241 - DNA, 1212 bp, Artificial Sequence
  Optimized genes for Pichia pastoris
atggccggggcaacgcgaataaacagcagagttgtccgatttgctatctttgcatctatcctggttctgctcggttttatcctttcaagggggtctgccacttcctattcattaccatcaggactaacatcagatacttcgcaatcgacgggctcatcgccaaaaagcgaatcgaagccaagttctcaagggtcttcgggggcgactgaactcaagaaaacgtacacgacagatggtaaagaaaaggccaccttcgtttccttggcacggaactccgatgtatggtcactagcttcatcaatccgccacgttgaggaccgttttaatcacaaattccattatgattgggtctttttaaacgacgaagaattctctgatgagtttaaaagagtaacatcggcattgacttctggcaaagctaaatatggcttgatacctaaggagcattggagcttcccagagtggattgacaaggagcgcgccgccaaaacccggaaggagatggccgcgaaaaaggtgatttacggggactccattagctatcgacatatgtgccgctttgagtcgggcttctttttccgacacgaacttatgcaggagtatgagtggtactggagagtagaacccgacattaaaatttactgtgacatagactacgacgtttttaagtttatgaaggataataataagatgtacgggttcacagttagcttaccggagtacgttgcgacaatagaaactttgtgggataccacccgtgccttcatcaaggagaatccacagtatctccccgaggacaacatgatggactttatctcggacgacgacggacttagctacaatgggtgccatttctggtctaacttcgaggttgggagcttatcattgtggaggtcagaagcttacctaaagtatttcgatcacttagacaaggctgggggcttcttttacgaacgctggggggatgcacctgtgcactccatagctgccgctttgttcctgcaccgggaccagatccacttcttcgatgacgtcggttatttccacaatccttttaataattgccccgtcgatgcagatctacgtgaagagagacgctgcatgtgcaatccgaaagatgatttcacttggaaaggttactcttgtgtgcctgagttcttcacagttaacaatatgaaacgcccgaaagggtgggaggcgttcagcggttag

SEQ ID NO: 4242 - DNA, 612 bp, Artificial Sequence
  Optimized genes for Pichia pastoris
atgaactcggaatacgattacttgtttaagttgttacttattggcgattcaggcgtaggtaagtcatgtttattattgcgtttcgcagaagatacctatacgcaagattacataagcacaataggcgttgatttcaaaattaggacgatagagctcgacgggaaaacaatcaagcttcaaatatgggatactgcgggtcaagaaagattcaggacaataacgtcatcctactaccgtggggcccatgggatcataatcgtttatgacgttacagatcaggagtcatttaacaatgtaaaccagtggctgcaagaaattgatcgatatgcgaccgggggcgtcatgaagcttttagttggaaataagagtgatctcaaggacaagaaagtagtggattataccgtcgcgaaagaatttgctgacgccctggagatacctctaatcgaaacatccgccctcgatagtacaaacgtcgagcaagccttctttaatatggcccgacagattaaaagtcaaatggtaaataatcaggccggaagcggaacagaaaaggccagcatcaatttgcgcgggcaaagcgtcggcggcagtcaaaattcatcctgttgttaa

SEQ ID NO: 4243 - DNA, 1131 bp, Artificial Sequence
  Optimized genes for Pichia pastoris
atggatggtgaggacgtggcagcactagttatagacaacggtagtggtatgtgcaaagcgggatacgccggggacgatgccccgcatacggtttttccgtccgtggtgggcaggcccaggcatcagggggtgatggttggtatgggtcagaaagattcttttgtgggtgatgaggcgcaatcgaaacgcggcatattgacactacgttacccgatcgagcatggtatagtgacaaattgggacgatatggagaaaatctggcatcacacgttttacaatgagctaagactagcccccgaagagcatcctgttttgttgacggaagctccgatgaacccgaagtccaatcgcgaaaagatgacgcaaattatgtttgaaacattcaacgtgccagcattctatgtatcaattcaggcggtactctcactttacgcctccggaagaacaacggggatcgtattagattctggcgatggagttacccacgtggttcctatatacgcaggcttcagcctcccgcacgccatactaagaattgatttggccggccgcgacttgactgactacctgatgaaaatattatccgagcggggctatacttttagcacctcggccgagagagagattgtgcgcgacataaaagaaaagctctgttatgtggcactcgactttgatcaggagttacagacatcttcgcagtccagtagcattgagaagtcgtatgagctaccggacggacaggtgataaccatcggtaacgaacgtttcagggcacccgaggcgttattccatccaagtgtgcttgggctagaagcgtccggaatagatcaaaccacatacaactcaattatgaagtgcgacgtggacgtgagaaaagaattatattccaatatagtgatgagtggcggtaccaccatgtttcctggtatagccgaacgaatgcagaaagaattaacggctttggcaccatcgagcatgaaggtaaaaatatcggcacccccggagcgcaagtattccgtttggattgggggcagcattttggcatcgctgggtaccttccaacagatgtggatttctaagcaggaatatgacgaaagcggtccctctatagtgcacttgaaatgtttctga

SEQ ID NO: 4244 - DNA, 549 bp, Artificial Sequence
  Optimized genes for Pichia pastoris
atgagcggagggccggtcccagtgtttaagaaatacacaactggcagtaagggtatctgggagaaaattaggcagctcctcacccttgttccgaacagatcaaccggtaacccattggtaaagaactatcgcgtaccgccacccggcagccagacacttaaatataaggacccggtcactattccggcgggggatatagtgaaaaaccaatactatgatcgtgatcataggaggaactatcctaggcttgtagcatttgatcaaaccaaagtttccggtttattgactcttggtagtgcacagaaccctaggatttctgtaggagaaaagggccaaaaagagttggcagttttcgaccaaagcgtcagcctatcctcgaccctcgcaacaatcgatccaaaagtagtaaagagcgagctcttggccgagggcgggagcccggttgtagcgccttcattgaataaaaaaatgaaattcagacttaccgaggaatcggaacatggcatgtatcctgaggactacccaatccgtatctttgcccaaaactag

SEQ ID NO: 4245 - DNA, 435 bp, Artificial Sequence
  Optimized genes for Pichia pastoris
atgtcagacgtagaacagcaggtcgtggaagaagtggaggtagctgtagaagaaacttccgcgtcgatctcaatagaagatgcggtaaaaaaagttctccggataagtctcgttcacgacggactcgccaggggattaagggaggcgtcaaaggccctttcgagtggagctgctcaattgtgcgttctctgcgacagcgtgacagatgaggctataataaagttggtcgaggcgctgtgcaacgagcccgaagagaagataccactaatcaaagtctccgacgccaaacagctcggtgagtgggcagggttatgcactctcgatcgtgagggtaatgctcgaaaggtcgtcggcgctagctgtgttgtaataaaggattgggggcaagattcggaagaacggcacgttttgttagactatttctcttcaaactga

SEQ ID NO: 4246 - DNA, 2271 bp, Artificial Sequence
  Optimized genes for Pichia pastoris
atggtgaacgttaagttcgaggattattctagtctcttggaaagcctcgatcaaaacatcgaccaggcaaatagacgtgaagatcccttcgctaagcaaatgcagggagtcaaaccacgcctaagtactatgtcatacagttctgccggttcctataccccagattcgtcgcctgatatgatcttcaatcaggagcaatataatgagaaccaattcaacgaaaacatgtttaataatgacctgtactcgaccctatcggagctgcctgaactttcaaacatgagttcaagcatgtcaggcaccagtgaaaacaacagccctcactcaacagaactaaatgacttgggtatgctgaacgggatcaattttggctcttcggcagatacaaacaatactgttggatcatccgtaaatacaaccattggagatcaagtactactaccggtggtagacatggaacgcaatgatgccatagcggcgagtgcggctcaccaatcaatcaaagacagtaaggtagcgaagccacgcaagaagatgaagagctcgcataacctgattgaaaaaaaatatcgaactaacatcaactccaagatcctagagttacgcaactgcgtgcctactttgcggatcgtgatctccagaaatggtggtggcaatagcggtgatgaattttcgaaagactatgagggtctagggtattccgatgacgagtcgaaactggacggtctacagcccgcccgaaagctcaataaagccacaatcctggcgaaatcggtcgagtacattaaacacttagaataccgaaattccctactcactactgaaaatgagaaactcaaagaaataattcagaacagcggtgcagctacagactcgggctcaggtaatatgatgaacaagctgattataggcagtcttgcatgcttagctggaggcagtacgttaaacgatatgtctaacgactctagatcgctaatgacgatgccaatcttcatttttaatagcaatgagactacactggcattgaagccattactgggaattgtgaaagggttcctggctatatacgtgctctatttggtcatcgccccgctgtttcatagctccactgtttgtatcgaaaaagatgagaaaacaatagctaacgaaaataatgagagcccagattggccacaagggaaacaagggggatttttctccttattggttaatattgcaacctcgggcttgagcgtcgcgctaaaccgagacccctacgctccaatgatgcaagctttttattttaaacagctaagcctatacggcaacggctccagtctcgctagttacatcgctgcctcatattggcggtgcgcacgtcagtctcgaaatcaaattcccgcaactgactctaaaagtcaatatttgcttgaaaacttcgagtatgcgcaagtttttgagatcaagtctatgaacacgttgcttgcaaaataccctaaccttaagctaaatcgaactcattttgtggaacaagtgagtaaactattgtgtgactccctgctggagaactgcattcacaaaatgattgagcttgaagcattaaaacttcagaaaaaagaacaattagccgccgacgataccgaacaggaagaacagactgaaaggacaattagtgaatttcaggaacaacgcgaccaatatctgaaacatgccagtcagctgtcttctactaacgaacaactactcaaatgcaagcttattaaatgtatgatagacactagcctcgaaaaccttcaggaatgtggcagactaattcaaaccttcacgtccaataagctgagcaaagacttggtggcatgctttacgtgctgcattatctgcgcgctatccgagggtagcccctctatcgaacaggttaatctcttcattgatcggttaaatctgccaaattatacaaacgtgtatgtcaaaaacaccaaggtatcccttctgctttacgttagtctcctgacgatggtaaatagcttaccagactcgacatactctcaaagatttgtgcaggtcgacagcgattctgatgaggaagacgcattggattcagatagcgtggggtctggcagctatgacaaccacttagttagggataaactcaccaacatcttaagtaaccttagaataattactggaacccccaagtcaaagaatgatcttgccattattgagtctactacactcaaaagtatactcatagacggtcttgtttcaaggatcaatctcttggatcacgcttga

SEQ ID NO: 4247 - DNA, 333 bp, Artificial Sequence
  Optimized genes for Pichia pastoris
atgcctgctccgtacgaaaagggtagcgaaaagaagggcgcgacactgtttaagacacggtgtttacaatgccacactgtggaagccggtggcccccataaggtaggtcctaatttacacggagtgtttggacgtaaatccggcctcgcagaaggttatagctatacagatgctaataagcggaagggtgtggaatggtccgagcaaacaatgtctgattatctagaaaatcctaaaaagtatataccgggaacaaaaatggcattcggtgggttgaagaaggcaaaagaccgaaacgatttaattacatatctagcgaaggctaccaagtaa

SEQ ID NO: 4248 - DNA, 1506 bp, Artificial Sequence
  Optimized genes for Pichia pastoris
atgacctttgcccccccgttggagtttgaaatcgatctgcccaacggcctgaagtacacgcaaccgttaggtttgttcatcaataatgaattcgttgaaggtgtcgagggtaagctgctcccagtaattaatccttgtgacgaaaccaagatcacgcaagtgtgggaggcttcagctgcagatgttgatcgtgcagtagatgctgctgaagatgccttcaacaatagcgtctgggccacgcaagatccacttgaaagaggtaaactgatgaacaaattagccgatctcatagatcgagatttcaatattcttgccgggatagagtcaattgacaatggaaaggcgtacacatcagcacaaggagatgtcacgctggcagtaaactacatcagatcatgcgcgggctgggccgataagatactaggaaatgtagtagactcaggtaatacacacttaaatctggttaagcgagagccacttggcgtggtggggcaaattattccctggaattttcccctgttaatgctggcatggaagctcggtccggccttagccacgggaaatacagtcgttctgaaaactgccgaatccacacctttgagtggtctatacgttgctaagctgataaaggaagcaggttttccgccaggtgttgtgaacatactttcgggcttcggaaatccggccggcgcagcgatcgctgctcatccaagaataaaaaagattgcgttcactggttcaacggctacgggaaggaaaattatggaggcggcagcaaaatctaatcttaagaaggttactctcgaattgggtgggaagtcgccaaatattgtgtttgaggacgcagatatacaaaagactatacacaacataattcttgggatctttttcaattcgggtgaggtctgctgcgctggcagtcgcgtctatatacaggataccgtatacgaagaggtcctagaagcatttaagaaggagacggataatgtgaaagtagggggtcccttcgaggagggtgtatttcaaggccctcagacaagcgagctgcaactcaacaggattctatcgtatattaaacatggtaaggacgagggagctcgggtcattacaggaggatctcgataccggaatcggggttactacattaaaccgaccatatttgcagacgttaccgaggacatgaaaatcgtaaaagaggagatcttcggccccgttgtcaccatcactaagtttagcacggtggatgaagttgtcggctacgcgaacaataccaattacgggttagccgccggtatccatacgaataaccttaacaaagcaattgatgtggctagtcgcatcaaggctggagtagtgtggatcaatacgtacaatgacttccaccatatggttccgttcgggggttacggggagtcaggcattggacgtgaacttggtgctgaagcgcttgataactatacacaggctaaagctatcagaatagcatatactcccgagcataaatag

SEQ ID NO: 4249 - DNA, 1179 bp, Artificial Sequence
  Optimized genes for Pichia pastoris
atgatcagcttccagccatcgtattatgtatcaacccctgctttgttatcgccgtcacgccatgaatatggataccagtcttctgcagtcacaccctgcttctttgaaaacaaccttgatacagtgctgagtgctctacaacgccacaactatacctccccgcctccaccgaagataaaaccgaccgaagatcagcgcagctattacgtaaagatgtccaaaaaatctggcgacttcagtgactatggtgttaaggtgtaccaggatcaaaaattcactcatgtatgggtgtacagtacttccgacaacgtaaagcgacattttaagtaccccaatagcgccgtgcagtacgagggcatcagggccaaggtcgcgaggaacggacgctttctactaatacaaatccctaaaattagtcgcccggacgtcgtcctcaatattgttcaaaaacggctccaatccatagcgaaccaagaaagaaaggaaagagaggagcttgagcgccgcgagttacaacggaaggcagccatggaacgcaaccgtaggctgagggccttggaagaacagcagttggcggctcaacgggaatatttcgaaaaatcgctgcagtccgctttctcgcctttcttcacatatcgactcgaaagtaagcaaaaggatgaacaggagtcaaatgcagaatctgccaccaaccaagttacggcaaaaccaaatgtaattagaatccctgtcaaccacgtggacgagtccaacgaagttatacccactaaagctccgaaggccagtaagacggacgtggaggaacaacccaatgtgaacgatgtggaaaaagaggctgatatgcaggacgtagaagagaaccctaacacacaagatgccgagtatgagaccgaacaattctcagatttcgagggattctctgatgatggtgatattgaagaagctattgaaccgatggatgaagatgaggaggacagtgacaattcccaatttatggaggaacccgaaatcctcaaacgacggccgagcccatattcgatcagtttccctgccaccttgtccgcagaatcctcttcgactaaggcgcctaagatcaaaaaaccgaataaaattcctatagaggaggttgaggatgaggaattcaaacggttcagcagcagctctgacaatgactcctaa

SEQ ID NO: 4250 - DNA, 1230 bp, Artificial Sequence
  Optimized genes for Pichia pastoris
atgtctcagggaactcttttcattacagaacaaacccgaggcgtcgtgcctaaaggattagtacaatatttcaaactagacgttaaaattagtaacaaggaagatgaacaattcaagaagtacttccctctaaattacataccggcatttgtaggacccaaagggctgaagctcaccgaagtctcagccgtaatagagcacttgctgaatttagcgggtgaaaaaaagttgaagggaacgaccgaactcgaacaggttcaagtcaataagtggattagttttttcaacacagaggtgatctctacgtccgcgcgcattttcttaccacttctgggaaaggcaccttataataaaaaggacatcgatgccgctacggagcgtctcgatactattatacagataatagaagcgaggttgtcagagtttacgtacttagtcggcgaacgcatcactgtagctgacttgttcgcagccacagtcataggcaggtctctagaaacaatatttgacaaagcgtggatcagcaagcatcaagatattttccgatggtttagcacggtgagcgctcacccggtcctctcatggaggtacgtagactttaagccgcgggacaaacccgtggaatatgtgcccccgaaaaaagaaaagaaagaaaaaaagaaagaagaaaaacccaagcaggagaagaaaccggcgcccgcggcggctgagcaaagcgacgagccacctgtggaaaaaaaagctaagcaccctcttgaagcattaggaaaacccaaactagcgatagatgagtggaaacgattttactctaacgaagaaacacgtgagtcggccataccctggttttgggaacatttcgacgcggacgagtggtcgctgtggaaggtgacatacaaatacaatgacgagctcacccttacgtttatgtccaacaacttaataggaggctttttcgcaagactcactggatcaataaaatatatgttcgggtgtgcagtcgtttacggtgaaaacaacaataacggcattattggtgggttcatggttaggggccaagattacaagcctgcattcgaagttgctcctgactgggagtcatacagctacgaaaagctcgaccccaattccgaagaagaccgtgagttcttcaataatatgttagcttgggacaagccgattgtcgtcaacggggaggaaaaggagatagcggatgggaaggtgcttaaatag

SEQ ID NO: 4251 - DNA, 1167 bp, Artificial Sequence
  Optimized genes for Pichia pastoris
atgtctcatcgtaagtttgaagccccgcgccacggcagcctgggatttcttcctaagaaaagagcctcttcccctagagcacgatgcaaagcctttcctaaagacgataagagcaaaccagtggcacttacggcattcatgggctacaaagcagggatgagtactatcgtgcgcgacttagaccgtcccggatctaaaatgcacaaacgggaggtcgtagaggcagtgtccattgtcgatacccctccactagtagttgttggagttgttgggtatgtggaaacgacatctggcctgaagtcgctgacaaccgtctgggcagagcatctatccgacgacgttcgtcgccggttctacaagaattggtacaaaagtaaaaaggtcgctttttcaaagtattcagccaaatacgctaatgatccagcctcgatagaaaccgagctagcgaggataaagaaatacgcttccgttgttcgagtcctagttcacacacagattcgtaagacgccactcaatcaaaaaagagcacatttagctgaaattcagatcaatgggggatctataagtgaaaaggtcgactgggcgagggatcactttgaacaaacgatagcggtggacactgttttcgaacagaatgagaatatcgacgttatcgcagttacgaaggggcatggtttcgaaggcgtaacacacaggtggggaacgaaaaaacttccaagaaagacacaccgcggattacgcaaggtagcatgcataggagcctggcacccggcacatgtcatgtggaccgtcgctcgagctgggcagaatggttttcatcaccgcactagtataaaccataaaatttaccgtgtcggtaaaggggacgatgaatctaatgggtcaacagagtacgatcgtacgaagaaaacggtcacacctcttggcggtttcgtacgatatggcgagataaggaatgactttgtcatgatcaagggctctattccgggtcccgtcaaaagagtggtaaccttacgcaagtcattatacacccaaacatcacgcaaggcgaccgaacaggttaccctcaagtggatcgacactgctagcaagttcgggaagggaaggtttcagacgccggcagagaaggcagcatttctgggcacattaaagaaggaccttcagtaa

SEQ ID NO: 4252 - DNA, 1230 bp, Artificial Sequence
  Optimized genes for Pichia pastoris
atgctgacgaaagtgatatccctcgctattttaaccgcctcagcctttgcggacagcggggaatttacactttggaatctctcccctggggatccctatgattccacattttggggcgtgagcgaggggctcatagttcccgttgagccaggggtaacattcgtgataactgatgatcttcaattaaagaccactgacgatcaatttgtaactgtgggcgaggattcagctctcggattaggtgcagagggatccgtcgagttctcgattattaacgaggacggcattacatccttatactacaatggcgagctggttacggcatacatttgtgaaggggcagagccccagatttacttgaccggttcagaggaggaccctgagtgtgttagctatactgtagcagtaatcggcgtggatggggaggcaccccctaccttccctgaggaagatgatgagactacgacaaccgatgatcctactgatgagccgacagatgagcccactgatgaaccgactgacgaacccacagatgaacctacagatgagcctacggatgagccaactgatgaacctacagatgagccgacggatgaacccaccgacgagccaactgacgagcctactgatgagccaacggacgagcccactgatgagcctacggacgaacccaccgaagagcccacagaagagccaacggaagagcccactgatgaaccaacacccccacccccacattggggaaatgaaacagtaactgccacgaaaactgagtatgaaaccaccaaagtcaccatcactagttgcgaggaaaccaaatgttacgagacaacttccgatgcgtgggtgagtacatgcactaccgaaatagggggcaaggtcaccaagatagtcacctggtgtccaattcccagcacgccgggcccgaagccgcctaaaccgaccaaaccgacagaaactaagcctacaacggtgccggccccgaccacaaaaaagccggagaccccgacaaccaaaaaaccggagactccggcaccagaaaagcccgaaaagacaacgaccgttatcccacccccgacgactgagaagccatctacgttgagtacgagttccgtaacaggttcggtaacaattcccacgataactgccacaggtggtgcagggtctaactttaatctgggtgggttaactgtcggagtagccggcatagctatggctctttttgtttaa

SEQ ID NO: 4253 - DNA, 192 bp, Artificial Sequence
  Optimized genes for Pichia pastoris
atgagtcgacaaggcggaaaggctaagcccctgaagaaaccgaaaaaaaagactcaagagttcgatgaagaggatctggcatttaaagctaagatgaaagcagatgcagcggcaaagaaagcgatggctgaaaaggcttctaagggcggaccgcttatcggaggaggtatcaaaaagtcaggtaaaaagtag

SEQ ID NO: 4254 - DNA, 354 bp, Artificial Sequence
  Optimized genes for Pichia pastoris
atggctagtgcaggtttaaatgatgttgtcactcgtgagtacacgatcaatttacataaacgcttgtttggtgtgcaattcaaaaagagggcaccaaaagccgtgaaagaaattaaaaagttcgcgaaattacacatgggtacggaggatgtccgactagatcctaaactgaacatggctgtgtggaagagaggaataaagggggttcctttccgtatgcgattgcgtatttcaagaaagcgcaacgaggatgaggacgcgaaatacaagttattttcctatgtcgagcctgtgaacgtccctacagtgaaaggactcgagacagtagtcattgaagaggatgatgaggagtaa

SEQ ID NO: 4255 - DNA, 1089 bp, Artificial Sequence
  Optimized genes for Pichia pastoris
atggcaaaatccagtaaggtgagttcgaagtccgcggcaaaggccagcaagggcgaaaagaagtcaaaaaaacaggagtccagtagttcagagtcgtcgagcggatcatcctcggaaagtagcgggagcgaaagtgagtcggaagaagagtccgtgaaggagtcaaaaaaagaagccaacagcagtgaaagcgagtcagaatccgaatctgagtctgaagctgagagcgataagaaagaggaagcagctgaatcgggaagtgagtcggagagcgagagcgagtcagaatcggagaaagaggatgaaaagtctgctaaacgaagcgccgaagagtcggaggaggaacccgccaaaaaagctaagacagaggagataactactttgtttgtcgggcgattgtcctggtcgatcgacgatgaatggctaaagaaggagttcgaacacattggtggtgttgtaggtgccagagtcatgatggaaagagccacaggccgatcgcgaggttacggatatgtggactttgacaataaagcttccgccgaaaaggccctggaggaaatgcaaggaaaagaaatagatggccgacctataaacgtggatatgtctaacagtaaaccggcagctcccgctgcacgaaacaatgacagagctagtcaatatggtgataaacgaagtccgccaagtgacactctgtttctggggaacttatcgtttcaggccgacagagatacgctttttgaactattcagcaagcatgggaacgttacatcagttaggattcctacacacccagaaacagaacagcccaagggttttggatacgttcaatttagttctgtagatgaggcaactggggcactggaggctctcaatggtgagtatgtcgataatcggccaataaggctagactactcgacaccccgtgacccgtcggcttcaggaggccgaggagggcgcggtggtcggggcggccgagggggctttaggggaggtcgaggcgggttctctggagaccgttcttttggctctggggcgaactcggccccagtaaactctggctttcaaggacaaaaaaaaacgttcaactga

SEQ ID NO: 4256 - DNA, 915 bp, Artificial Sequence
  Optimized genes for Pichia pastoris
atggctgataacaataaatcaaatttcttcgttgacttcatgatgggcggagtatcggcggcggtttcgaagaccgccgcggcccctatagaaagggttaaacttctcatacagaaccaggatgagatgttgaaacagggacgtctggcaaagaaatatgacgggatagcagaatgcttcaaacgaaccgccgcagacgaggggatagccagcttttggcgcggcaacaccgccaatgtaattcggtattttcccacgcaagccctcaacttcgcgtttaaagataaattcaaggctatgtttggcttcaaaaaggacgagggctggtggaagtggttggcaggaaatttagcctcaggcggtctagctggcgccacgtcactgttctttgtttacagcttggactacgctcggacgcgcttggctaatgatgcgaaagcgtcgaaaggtagtggcgagcgtcaatttaacggcctcatagacgtgtataaaaaaacattagccacagacgggatagcgggtttgtatcgcggatttttaccctcggtggttggcatcgttgtctaccgaggcctgtactttggtctttatgactcgctgaagccgatcgttctcgtaggaccacttgagggaagttttctggcgtcctttttactaggatggaccgttaccacaggagcatcgacagcgtcctaccctctggacacggtacgaaggaggatgatgatgacgtccggtcaagcagtgaagtacaacggtgcattcgacgcctttagaaagatcgtggccgccgaagggatcaaatccctgttcaaagggtgtggcgcaaatatcctaagaggagtcgccggggcaggcgttatctcaatgtacgatcaactacagatgatcatgtttggcaagaagtttaaataa

SEQ ID NO: 4257 - DNA, 849 bp, Artificial Sequence
  Optimized genes for Pichia pastoris
atggcccgcggacccaaaaaacacttaaaacgcctcgccgcaccctctcattggatgctagataaactatctggtacttatgccccgagaccgtccccgggacctcacaaacttagggagagcctgccattgattgtgttcctgaggaacagactcaaatatgcactgaacggcagggaggttaaagcaattctaatgcaaagacacgtacaggttgatggtaaagtccgcacggatgccacattcccagcagggttcatggatgtaatcacgttggaagcgacgaatgaaaattttcgacttgtgtatgacgttaagggacgcttcgccgtccacaggataactgatgaggaagccacttacaagttaggtaaggtcaagaaggtccagttaggtaagaaaggaattccgtacctggtaacgcacgacggtcgcaccatacggtacccggacccagacattaaggtcaatgactcaatcaaaattgatttagcaactgggaaaatcttagatttcgtcaaattcgatgtaggcaagctcgtaatggtgacgggtgggcgtaacttaggcagggtaggtgtcatcacccaccgtgagaaacatgagggggggtttgacctggtccatataaaggatgcactagaaaaccaattcgtgacgcgcctcagtaatgtatttattatcggagaagcaaacgcacccataatctcgctgcccaagggcaaggggattaagttgtccattgctgaagagcgtgaccagcgcagacaacaacaggggcttgacgttgaggcggaagaggaggttgaggaggaggctgatgtggattcggaagtggacttcgagtag

SEQ ID NO: 4258 - DNA, 1218 bp, Artificial Sequence
  Optimized genes for Pichia pastoris
atgcagacattcgtaaaaagatccattcgtaatataccaaagatggccacgtcggcccaccaaaatttcgccaaatacctcgccacagaccacatggcttccgacctggtgccgttagatgcgtctaagcttcaggtcacgcgaacaacccagcccaagtcgaagctccccaaggaaaaattggtctttggtcagtcgtttacagatcacatgttgaccgtagagtttgatcaggcctctggttggggaacgcccgagataaaaccctatggacccctaagcctagacccctcagcctgtgtttttcattatgcttttgaactcttcgaaggcatgaaggcatataaggactcccagggcaagatccgtctgttcaggccagatatgaatatggcccgatttaataagtcagccgcccgaatatgcctgcctacggttgatggggaggaattgatcaagctcatatcggagttacttaagctggaccagtcgttcgtgccagaaggcgaaggctattctctttatatcaggccgaccctcatcggaacctcaagtgggctaggtgtgggggcgcctgataaagctcttctgtatgtgatttgctccccggtaggtccctactatcccaccggttacaaggcgatctcgctcgaagcaacagactacgctacaagggcctggcctgggggcgtcggagataaaaagttgggtgctaattatgctccatgcattaagcctcaactatccgctgcgaagaatgggcatcagcagaacctttggctgtttggggaggaaaaattcattactgaagtggggacgatgaatgtatttttcgtattcaagaacgctgataccggcaaaaaagaattagtcaccgcgcctctggacggtactatccttgaaggggtaaccagagactccatcctgaaactcgcgagagaccgattagacccgaacgaatgggaagtaaacgaaaggtactacaccgcacatgaagtggccgagaaagcagagaatggattgttggtggaagcgtttgggtccggtacagccgcggttgtagctcccattaagaacatcgccttcaatgggaaggactatgatgttcctttagttcctggggaacaatacggtgaaatggctaagacggttgccgattggatagccgatattcaatatggagtggtcgactccgaatggtcaagagtcatcaactag

SEQ ID NO: 4259 - DNA, 345 bp, Artificial Sequence
  Optimized genes for Pichia pastoris
atgggcttaggaaatttctggttggaacgcaatatcactaataaacacttagttcggagttctaattttgcggaggatcgcacacaacgcctaaaagaggctaagcttgacgcggcaaaagacatcaaagaatataaacaaaagaaagagaaagagctgaaagaacatgaagcacaattctccggctccaacgacgatctggagaaagccgccgaatcggaggtgcagaccgaattagttgagatcgacaaatcagcagaagcgaaaaaagaagatgtggtaaaactactgcttgatgcaataactcacccaaagccggaattgcacgttaatgcgagagcttaa

SEQ ID NO: 4260 - DNA, 309 bp, Artificial Sequence
  Optimized genes for Pichia pastoris
atggtacaagagataaattcagccgaagaatttgataaagctatagcctcaggcgtggtgttggtggattttttcgcaacttggtgtgggccttgtaagatgatagcaccggtattggacaagttctccaaggagtacgagcaagtcactttttacaaggtggacgtggataagttgagcgaggttgctgcgcggttcgagatatctgctatgcccacttttctcttttttcaaaatggggaagtcgtttcaaaggttacaggcgcgaatgcagcggctatcaaacagaccatcaccaaactgatctaa

SEQ ID NO: 4261 - DNA, 1779 bp, Artificial Sequence
  Optimized genes for Pichia pastoris
atgaaaaacttttttaattcgtctgattcagaaaagcatgaggaaaaagtaaacgatgaaaaggtccaatctatttcgtactcccaatctatcttgtctctacccgacctcgaccccacgctgtcccgccacgcgtcagagtacgaagcggatcttagcaaaatccagccgggtgttgctggggaaaagggtcaccaactcaaacgcgatttgaaagctagacacatctcgatgattgctttaggtggcagtctagggacggggctattaattgggacggctaactccctggcaacggccggcccgggcagcgtgtttatcacttactctttcgtgggactaatggtattcttcgttatgagtgccttgggtgaaatggcgacatacatccctttggcaggtggatttacgggctattcggatcgttacgcgcacccagcactcgggtttgcggtggggtactcgtatctcgcgaaatatctcattgtgacccctaaccagctagtagctggttctctagtgatgcaatattgggtttcgcccgagaaggtcaacccgggggtatggatcactatcttccttgtcagcgtagtcttgattaaccttttcggcgttaagttcttcggcgagcttgagttttggctatctagccttaaagtaatcacggtactcggcttaataatcatgctatttgtctttatgctgggtggtggaccagatcatgaacggctcggttttcgttactggactaacccaggagctttcgcaccgtggaagggaatagcctcgattccgaaggctaagttcattgcttttgtgagctctttcgtctacgctgtgttcgcttactccggaacagaactagtgggcgtagtggtagcggaggcttcaagaccgcggcgtaacgtgcctcgcgcgattaagctaactttctatcgcatttgtgtgttctacattttatccgtactcctactgggctgttgtgttgcttataacgatgctgaacttgttgccgctagagccaaatcaacatcctcctctgcttcaccctttgtggttgctattaacgcccaggggataagcggattgccacacctaatgaacgcttgtattttgatcttcgtgtttagtgcctgtaattctgatctgtatattgctacgcgtacactttacggtctaagcgtccagcgcaaggcaccaaagatcctatcgaggacaaataaaactggtgtaccttacctgtcgctggccgtagctttttgtttttcctgtctagcatatatggcctgttcaagtggatcggcgtctatcttcggttactttgttaacgtcgtcagcatcatggggttgctcacgtggattagcttactgattacgcacatatgtttcatgaacgcaatgaaagctcaggggatcccgagaaaatcattaccgtatcgcgcgccttttcagccctacgcttcatggattaccttgtttttctgtatcttagttgcgctgataaagaattttacagtctttttgaatggatttaactataaagattttataaccggttatatcggaataccttattacttcatatgtttcttcggttataaatttatcactggggccaagcgtcataaatccgccgaggttgacctattaacccataaggacgtgattgacgccgaagaagaggagtacgccttcgcagaggcagagttaaaagcggaacgaggcaacaaaaaagacgcacagtggctttacgaccgtatttttggttggatcttttag

SEQ ID NO: 4262 - DNA, 408 bp, Artificial Sequence
  Optimized genes for Pichia pastoris
atgtcagatgcggtgaccatacgtacgagaaaagtcatcaagaacccccttcttgcgcgtatccaattcgtgatagatgtgcatcacccaggaaaggccaatgtatctaaggacgagctcagggaaagactggccgagatttacaaagcggataaagacgctgtttcggtctttgggtttcgtacgcactttggtggggggaagtcgtccgggtttgggctggtttaccaatcagtaagtgatgcgaagaggtttgagccaacttaccgcttgataagatatggcttggcgcagaaggtggagaaacctagcagacaacagcggaaacaaaagaagaatcgggacaaaaaaatcttcggaacacaagagaagtttgcgaaaaaggcggccaagcgagcagccgaataa

SEQ ID NO: 4263 - DNA, 1329 bp, Artificial Sequence
  Optimized genes for Pichia pastoris
atgccctcacacttcgacacacttcaactacatgccggccaaactgcggaagccccacacaacgcccgggcagtaccaatttacgccacaagttcttacgtattcagagatagcgaacacggtgcgaaactcttcgggctcgaggaaccaggatatatatactcgcgactgatgaatcctacacagaatgtgttcgaagaacgtatcgccgccctggaaggtggcgctgcggcactggctgtcggatcgggtcaggctgctcaattccttgccatcgccgggttagctcacactggggacaacgtaatatcaacgtcatttttatacggcggaacgtacaaccaatttaaggtcgccttcaaacggctgggcatcgaaagccgcttcgtgcatggcgacgaccccgctgaattcgagcgtcttatcgatgataaaacgaaggcgatatacgtcgagtccatcgggaacccaaagtacaacattccggatttcgaggcgctggccgaactcgcgcacaagcacggtattcccctagtggtcgataatacgtttggcgctggtggctactatgtccggcctatcgagttaggcgctgacatcgttacccatagtaccacgaagtggatcaatggtcacggcaataccatagggggggtggttgtggattctgggaagttcccctggaaagattatccggagaagtacccgcaattcagcaagcccagcgaaggttatcacggtcttattctcaatgatgcgttcgggccggctgctttcattggacacctgcgtacggagctactgcgggatctcggcccagcctccagcccgtttggaaattttttaaacattattgggttagaaaccttaagcttaagggccgagcgacatgccgaaaacgcccttaagctggcgaaataccttgaaacgtctccttatgtctcgtgggtgtcttaccccggactagaatcccacgactatcacgaggcggcgaaaaaatatctgaagaatggcttcggtgcggtgctttccttcggggtaaaggatcatggcaagcccgccttaactccatttgaagaagcaggtccgaaggtggttgattctttgaaagtcttttcgaacttggctaacgttggcgattcgaagtcgctcataatagctccatattacacgacgcatcagcaattgtcacacgaggagaaactcgcgagcggagttacaaaggattccattcgtgtgtcggtcgggacggaatttatcgacgaccttatcgccgatctcgagcaggccttcgccttggtgtatgaagaggcgaacaccaagctttga

SEQ ID NO: 4264 - DNA, 3051 bp, Artificial Sequence
  Optimized genes for Pichia pastoris
atgttgaacagagtgctgttggtcgccctttcatgcgtggtttttttccacttggtaacgaccttcccggttggtacgagctcggacagcttgcagattagaaatttgttatcccacaattttacgagggcgaatatatcagaaggcctttcaagcggagcaacatacttcgtagacgaagatacagaaacatattatgataaggaacttaaagtattacggaccaccaggtttccccgttacaataattatcagctacagccgtacgtggccaatggatacataggtagtagaatccctagagtaggctcagggttcacttatgacacctcggacaataagacttccgagaatttgaaaaacggctggccacttttcaataagaggtacagcggtgcatttattgctggctttttcaactcacaacctactgtccccgaaactaactttgaagagctagaaaaagatggttacgaatctatcattgctagcatcccccagtggacgtctctggaattgacggtaaacgttaatggaacaaatcagactcttaaggcagatgatgtagacatcacgcacatttcagactattcgcaacaattgtcactactcgatggtatagtcactacgaattatacctggttgggccttgtaaatgtgtccatatcagtactcgcacaccgagacatcgtaagcttgggatttgtgagtttggaactctcatctcaaaaaaacataaccgtcagtgttacagatattttagattttgccacctcgacacgatgttcatatctggattccggggttaatgagcagtctatatttatgaaggttcaaccgagtaatgttccgactaacgcaacaatctacagtagccttatgagttccaactcaacctcttcacttttgaagcaaaaccagacagtgtctcaaacactccgtgttaacctgtctaagaatcaagctgccagtttccaaaagtatgtgggcgtcgtgtctgatgattatctggactctattgagactaatctaacaagttaccaattcgcacgggaaacagcaaaatttgctgagattaaaggtcgcagttggatcctgaaatcccataaggaggcctggaacgagctgttgaacgggaaatcgatcgtctttcatgacaatgattttctaactctggcgagtgattcatccatctatcatctgatggccaacactaggtcggaagcaaatggagggacctcggcgcttggagtcagcgggttgtcaagcgatagttacggtggaatggtattttgggacacagacttctggatgttaccttcagtgcaggccttctcccccaggcacgcggtatcactaagcaagttccgtgaccatacgcacgaccaagccaaaaaaaatgctcaaaccagggatatgaacggggcagtttatccctggacgagtggccgattcggcaattgcacttcaactggtccgtgctatgactatgaatatcacatcaatatagatatcgccttcatgttttggaagctttaccttggcggagccatcgacgacgactatatgaaagagtttggttaccccatcatagaggatgtcgccagctttttcgttgactacgttgactacaatagtacgctcgataagtataccacaagaaatctaacggaccctgacgaatatgccgagtttaagaataatgccgcattcaccaacgtaggaatctcccagcttatgaaatgggcattgatacttggaaaacaccttaaggtcgggaatgagcgctcttacgataagtgggaagacataatgactaaaatgtacctgcctgtaaatcatgctggtgatgtgacgctggagtatactggtatgaataacagcatagaggtgaaacaggcggatgtagtattaatcagctatccattagatgacgaagatggcgccctccaagagtactttgactacgacgaagatcgcgccataagcgacgtaaggtactactccgataaacaaactgatgagggcccggccatgacgttctcggtttattctgctgtcaatgccaaatttaacaaagaagggtgttctagtcaaacataccttctaaagtccgtggagccgtatttccgcttcccatttggacaaatgagtgagcaaagtacggatcaatatgacacaaacgggggtacccacccagcatttccttttctgaccggtcacggggcgtttcttcagagtagtatctatggattaacaggtctaagatttagttatatatacaatgacacagataaatcgatcaaacgcagattagctttcgatcccttgcaactgccatgcctccccggtggtttcagtatcaacggttttgtctatatgaaccagactctcgatattactgtgaacgacacctatgctacaatagcgcatcggggaaacgcgactaccattaacgtttatgttgatagccgtaatgaaatgggagggaaagaacacaaaatacagccaggaaaatcactctcaatcccgttgtatcagactgagcaaaatatacccggaagttttattgaatgtactgtcaaaaatgtcacggctcttcagccgggtgtagtaggtgatcccattcaagctgtggcagatggggacaatagcacaatatggaaaatagaatcacgggaagagcctacacatctaatctttgatctcggtgacgaattggatatcgaaggcggcctagtagtctggggcacgtatcctgcggaatctttttccgtcagtgtcctccgggatttcaactcaacgaactaccgagtcataaataatgttgaaaattacgaccttatttatgagtcgggtaatgttacagctagtagtccgttcgacgaatcacacataaaaaaggtgcaaattttgccccataactgcaccaacttcacctttagcgaattaacggccagccgatatgtcttgttcgaatttacagacgtgctcgggtatccgcaggattatagttacggggctcaggtagccgaggtcgtactatactaa

SEQ ID NO: 4265 - DNA, 438 bp, Artificial Sequence
  Optimized genes for Pichia pastoris
atggggaagggaaaacctcgaggactaaatgccgcgaggaaactaagagtacaccggcgcaataatcgctgggccgacctacagtataagagcaagctcctcgggacggcattcaagtcttcgccgtttggaggtagttcgcacgctaaaggaatcgtgcttgagaaaattggcattgccagcaagcaacctaattcggcgataaggaagtgtgtccgagtccagttgatcaaaaacggaaagaaggttactgcattcgttccgaacgacggctgtttaaattttgttgatgagaatgatgaggtgctactggccggcttcggtaagcgcgggaaagccaagggcgacataccgggcgtccgatttaaagttgtcaaggtcagcggtgtaagtttattgtccttgtggaaggaaaagagagaaaaaccgcgttcctaa

SEQ ID NO: 4266 - DNA, 1035 bp, Artificial Sequence
  Optimized genes for Pichia pastoris
atggacatcgaggctgaaccttcccttagaagtattgtcaaccacgaatccctaaagtggatttttgttggaggaaagggcggcgtaggaaagactacaacgtcttcgtcgatctccattcaacttgctttgcacaatccaaataagaagtatcttctaatctccactgaccccgcgcacaacttgtcggacgcattcaaccaaaagttcgggaaagatgcccggcaggtagaaggtctgccaaacctgtcatgcatggaaattgaccccgactcgaccttagaaaacctacagaagaacaatgaaagcacgtttggctcggccgggggaaacgaccccttaaagtcaatgatgggggatataacaggctcgatcccaggcatagacgaagcattctcgttcatggaggtactgaagcacatcggggagaccaaagagaaccagatcaaatatgacacagtgatatttgatacggctccgacaggtcacacccttagatttctgcaactaccctcgacactcgaaaagttgctggggaaagtcaacgagctgagcggccggttcggcccgatgttgaacaatctcttgggtagccagggaggccaatcaatagatttcgcaagtaaaatcaaggagatccaggttcaagttacggaggttaataaacaattccaagaccccgagttaacgacgttcgtgtgtgtctgtatttccgaattcttgtcgctttatgagaccgagagactaatccaagagctgatgagctacaatatggacgtgaattccatcgttataaatcaattactattctctgatgactctgagtgccgcaggtgtaacgccaggtggcgaatgcaaaaaaaatacttggatcaaatggacgagctatatgaagattatcaccttgtaaaaatgcccctcctcgccatggaagtcagagggttagaaaatttaaaaaagttctcgaagtacctcattgagccgtacaatagcgaaactgatggccacgtagtattcgatcttgaggagcagtga

SEQ ID NO: 4267 - DNA, 321 bp, Artificial Sequence
  Optimized genes for Pichia pastoris
atggcgaccgaaaccgcgttaagctacgcggctctgatactcgctgactcagaaattgaaatcagttccgataacttactggctcttacgacgaaggcagatgtgaaagtggacaagatctacgcggacctcttttccaaggcgctagacgggaaaaacttaaaagaccttttcttcaacatctcttcagcacccgccagcggtgctgccgcggggggagcagccgcttcatctgccgatgctgaggaggcggcggaagagaaggaagaggaggcgaaggaagaatccgatgacgatatgggtttcggactgtttgattag

SEQ ID NO: 4268 - DNA, 444 bp, Artificial Sequence
  Optimized genes for Pichia pastoris
atgtcgcaggaagcgaaatctgtacaaagtgttcagactttcggaaagaagaagtctgccaccgcggttgctcacgtaaaacaaggctcggggttaataaaggtaaacgggtccccaataactctcgtccagcccgaaatcttgcgtcataaagtatacgagccgttactactagtcggactagataaatttgcaaacattgatatacggatcaaggtcaccggcggcgggcacgtctctcaggtgtacgctattagacaagccctcgcgaaaggacttatcgcatatacccagaaatttgtagatgaatcgacgaagaacgaactgaagaagatctttcagtcctatgacagaactctattaatcgccgactcacgccgcaaagaaccaaaaaagttcggcggacggggggcccgagcgagatttcaaaagtcctacaggtga

SEQ ID NO: 4269 - DNA, 5937 bp, Artificial Sequence
  Optimized genes for Pichia pastoris
atgtctttcaagcagtctctactatctcaaaccccgtcgtcaataacgccgtcacaatttctagctgatctgattagtcaacatagcaatgagcaaaagaatgtgcttgcactccttttcgctgagattctagtgcctggtagtcaacatattagttcgagtacttccacgaaaacaacggctctcacaccatccaccttgccggaagcaactgcacgtggttctcagttccgaagccttttaaagggtctaaacatagagcaaagcacttgggatcaaattattgaactgatctttgagactgatgattatttctcagatgcaacttccatttcgcaggttactgtcgcctcaatctcgcagtttctcgcaagtctcgagccagaaaatattgacaaattcctgaggtatgttgcacatcataaactaaaggatcatccgtttttgtttcagaaaaacctcttggtctcgctctattctcttaacccgcagcatggggcaatcgacctcctctcttgcccattgcaaccggtcctagcaaatgagccaaactcacgacgaacaatcatctggttcaagtacatcgctgagctcgaggtgtctctacttgtggaattaaagagcaggccggcgacggcggacgagaaccagattaatgaaattatagaggactcgtataaaacagcaccagagtatcttgggctggcagctctgcatctctggaaggagaataaagacaacaatgcagatccaggtactactcttgcctacctgaacttgtgtcaccattttattgtccagctcttagacataaatagcccatatcttattatactattaactgagtttaaggagatatcagaagatgagttgtctagtttgctcgccaattatgtcagtctacggccgaacggtgcaatcacagtggcgacgtatgcgctaagagacggcgttctgtcgagcgttttgaataaactatccaagttcaatgattgcttatctgtagctatagaggcatcgaatcttgggtggaatggtttagaaaagttcgttcaaaatcttctgagtaacaacccgaaacaggttcagtcccaactcgtagactttctggaagaacagagcagtttcgagtaccaatcatcgaacaacgagtcgaacgctcaaatcaagtctcaccgatctctcagtatacctgtagtatatacgctcctaaaagctatagaaggccagaaattatcaggagatttagttgacaaattcaaaaatgtacaggtatcagtcatccaagcatatcccaggcttataaattttggtcgcggacacgatgaagctatcctcgcaaacggcaatagccacagctttcctccatccgtggagcaagagatgaagtcatactatcaaaagatgtatcttaaacagctggagataaagtctgtgataaattcgcttaaagcctttaaggattctgataacccacacgaacaagacatatttgcctgtatgattcactccttattggatgaatatcggttcttcccagaataccctattgatgccttggccactacttccgtgctctttggcagcaccatttattttcaattaatcgaaggcaccacgttgacgattgcgctgagatacatactcgagtcatgccggcaaccacccgaagacaacatgtttaagttcgcggtgcaggcactatacaccttccgggagaaactcggggattataaatcgtattgtgcactcctgagcgaggtcccgtcgttgaagcagcaaccgcagatttatgaaatactgcagcaggtgatgaatggtaccttccgagctccgccgtccattccgagccaagggataggctctggagagagacaaccaagtcaaggaaaacaaccatctaacgatagccttgtcgtatcgaagtttaagtctctgaaccttgcagttgaactccagcgtcgtgatcaagagacccctgatgagaacgttagtgatcacgtgctgtttctcgttaacaatataacagaggaaaatttatcggccaaggtcgaagagatgaataaggtattggagccccaatactttgagtggttctccaattacctcgtaacgcagcgggtcaaaaccgaacctaactatcatagcctttattgttctctcatttcgaggctagataatcttctgttggatgcctacatcttaaatctcacttttaaggagataattttaatactgaacaagtgttatgacgttaatgacgaaatatccggccccgagcgcacgcatctcaagaacctaggcagttggttaggtttgataactttaaccaggaatcgtccgttgaaacatcgcaatttggcgctaaaaatgctagttctcgaagcctatgataaaaataaattagaagtcgtcttacccctggtatgcaaaattttagatcaagctaagaacagtaaggtattcttaccacccaatccttggacggtcggaaacctgaaactcctgaaggaactgtatgatgtaggtaatcttccgctcaagctcaaattcgagatcgaggtgttatataactcactaaatacaaagctcggggatatcgaggcagctaacatcattcgaacgcaccaaccggcggacatcgatcagtttgcagtagcgaccaatatgatgaaagagctaacgcttagtaatgtcaaccaaatgaagcaacagcagcagcagcaacaacagcagcagcaacagcagcaacaccaacagcaacagcagcaacaacaacaacagcaacaacaattctttttacaacagcaggccgcccttcaagcacaacaagtgcagcaaccccagattcccttcgacccacaggccaatccgggcgtctccacagctaccccagctgatgaatctaatcagctcaaagttttctcaaaccttctaggcactaccagctttgtaacaatcccaactctgaaatatctcttccaggcggccctggctcgggctgtaaaagaaattttgcccctggtggtcgaccgcacaaacttgatcgctctagtaacaactaaagccctagtatcaaaggacttcgcacttgaatccgatgaggctaaattcaggactgcatatatcaaccaagttagttacctcaccgagtcgttatccttggcgtcttgtcgggatccactccgcgagtctatacaaatgaatgccctgcagatagctaatacgatgccaaacattgacagcactttgtttgaagaactgccccaggcaataactgacaacatcgacctggcttctacgattatacagaaggcagcggtagaacgcgcaatccaggacatcgacgagctaatggccccgcaacttgctatacggagacagcaccgggaactgaagcctaaccagcaatttatagatccaactatgcgatctcgctacccaatgttgcttccggttcctttggggctcaagagcgacggagtaattcccaagcagtttatgatttacgagaattttgggaaaaacagaatcgtgtcgccgatgcaacaaccagaacatcttcagaatatcaacagccaattgaatccctctctcagacaaggcgctcagcaaccactagtcccaccgggcgttgcagagcagatgaagcagcaaatgccaccggccctgccgggccaaggcggcgccgtaagtttagagcaaactttcatgtttctccaacagttagtagattcagtaatcaacttgacgcgggatgcccctgaaaagcttatcagtgaagtaaatactgatagcgtcgtagtcactgtcctgggcgaaattttacagacttgcataggcgcaactgttacagatagtctgattctgaaaattagtcagtatgttatgaacatgctcttcgtacgtacgaactcgagcttaacacaaaatacactggtcttcttgcttgacaaattgtgtgagctttctcctttcaccgctaaagacatcagttggtggttggtgcacgcagaggatgaacgaaaatacaacaagaatgtcatgagagatcttatcttattagggttggtgccccttgcagaactcgataggtccctagctatccaaatagagaaaaagaacgttaaagctgttttgtttaccatatatctaatacatgacagcatactttctgaggacccaatagcgttacgggcagatctgataaattctatcgaggcgctgcaggtactagcgcatgagcccagtgaaatcggccgcaaagcctacatgtccataagtcggttgaaagcgattgtcaagtcgaactcgatccaaatctttaagatgtttggaacttcaaccataagtaaaaagcaatatatgtcttatgtcttcgccgaatgggtgaagctcgtgcaatattctcgggtcaaccgtgttcttgaggattttatttggcaactcgtcgatgacggcatagtaaacaattccgaaaacctgagtctactgatcacaacggcgactgaaatgtcagttgcagccttctccaaagaagctgacccatccaagaagttacacatagaaacatatgcaccggcagatgcgctggcacttttgttagtcaaactgttgttaatgcaagaagattcgactggggtagagcgcaagacattctttaactccatgttagccgtcattgttctggcatttgcaagtgaccataacaataatagtacgtcttttaacgagcgcccatatttcaggatattctcctcgttgttcagttactggttgtctgcgcgccacgagtttgaagatggggacgatgaaagtctcaaaacgtttaacagtgaactatacctgattttggctcagaatctgatggttatgcagccttcaagtttcccaggttttaccttcgcgtggatttctcttatcagccaccgtatgttcatgcccatgatcctagaggtccccgagaacaagggatggggaagattcgtcaacttgctgcagtgtctactctcttttcaactgcattacgttgactcggagaagattagcgatgttgttaatgtcgtctataaaggcacgttgcgtattatcgctcttttgtcacacgacttccccgacctgttagtacagtaccattaccaattaatctcctccacgccggagtcttacgtccaactgaagaacattatctctagcgcctacccaaaagggattacggtgccgaacccctttcagcaaggtttgaaggtggatcggttggaggaaatcaaacaagaaccgccgatcggctaccatccggaaagtgatttgacggccaaaggtctcaaaaaacccgtagagtcatacttacggattccaagtcagagtcttcttaaaactatctcgacgggcctttcagttgctgaaccgcgaaatgggaaatcaaagtatgacgctggtctagtgaacgctgtagtcttttttgtggggattgcggccgtcgaggaacagaaaagctttcgcgacggaagttcatttgactccacatcaaaccacgttatgttgctatctagtctaataaaggacggtgacgttgagctccagaacttaatcttaaccgcgatcgcgaatcaacttcgataccctaattcacacacccactggttcagctgtatattgctgcactttgtggggtcggccacactgtggggggatcaacgcgaagctataaagttcaacatcagctgtgtactcaccaagcgcgcaatgtcttacaacccaatcccatggggtatcttagtcacttttcttgaactagtctccaattcggagtatgagatcttctcctcacccttcatcaaaggagacgccacactcgagcggttattcggcacgttacaacatcatgttcgcaatcagaaacccatagatgaacagcctgagcccttgaaactctag

SEQ ID NO: 4270 - DNA, 900 bp, Artificial Sequence
  Optimized genes for Pichia pastoris
atggcccttgcaattcctcaaataggcttcggaacaggcaccacatggtacaagtatggccgcgagagcgaaattgaccagactctggtggacgctttagtgagcgctctacaggtcggtataacgcacttggatggagccgaatgctacggcactgctctagaaaccagggatgcgattaaaaaggcaaatatacctagggaaaaactttggatcactgagaagtattatgccggagactcgagccataagagtaaatcgaaggctgcgaatccgctagcggccctcaaggaaatcctccggttggaggagttggaatatgtagacttgtatttacttcactcgccgtatatcaccaaagagacccacggattcacactcgaagaggcctggggatacctggaggaagcgcaaagcctcgggttagcgaaaaacataggggttagtaattttacagtggcggatcttgagaagatacttaaggttgctaaggtaaagccgcaagtgaatcagatcgaatacaatgctttcctccaagaccaaacgccgggggtagtagaatttagtcaaaagaacggaattttaatagaagcatactctcctttggcgcccctgtataagggagataaatcgataaaagaggtcaaagagttcctcgactacgtatatgagctagggaagaagtatgggaagtctgacacccaggtcctgctcaaatgggtcttacagaagggcatcatacccatcactaccagcactaagacggaaagggttaaggaatttctcaagatcgacgactttcaattggaaccgtcagaagtcgaaaaaatcaccacccttggtgcaaaagctcccgtggttaggcagtattgggtaccagagtacagtaagtttgattga

SEQ ID NO: 4271 - DNA, 456 bp, Artificial Sequence
  Optimized genes for Pichia pastoris
atgggacggatgcacagctcaggcaagggtatatctgcgtctgccctgccttactcgagaaacccgcccagttggtttaaactcactccggacgatgtggtccaacaagtgatcaaatacgccaggaagggactcactccttctcaaataggggtactgttacgtgacgcccatggtgttgcacagacacgctttatcaccgggaacaaaattttgaggatacttaagtccaatggtctagctcccgcgatccctgaggatttatactatctaattaagaaagcagtctcagtccgcaaacatcttgaaagaaaccgtaaagataaggatagtaaattcaggctaatcctgatcgagagtcgtatacaccgactggcgagatactatcgtaccgtgagtgtcttaccacctaattggaagtatgagagcgccacggccagtacacttgtgaattga

SEQ ID NO: 4272 - DNA, 855 bp, Artificial Sequence
  Optimized genes for Pichia pastoris
atgagaaacgataagatcagcctttatagtcctgattattatctggcatgtacagtagggggggcgcttgcatgcgctccgacacatggagggatcacaccgcttgacttggtgaagtgccgaagacaagtgaatagttccttatattcaagcaattggaagggaattacatccatcatcaagaacgaagggtttcctgccctctacaccggcgtactaccaactttcatcggttacggtttacagggagcagcgaaatacggtggatacgagtatttcaagaaacagtacaccgatttaaacggcggcaaggcaaacacgttcacctttctggctgcttctgcaaccgcagaatttatagcggacatctttttatgcccgttggaagctatgaaggttaaaatacaaactaccctcccaccggacaagcccaatctgcgtgaacttagcttgtacaaaggattggtgccactgtggtgccgccaaatcccttacacaatggttaagtttacgtcctttgaaaaaattgttgacctcatttattctaaagctataaagaaacctaaagaccaattgtctaacttgcaacagacagccgtgagttttacgggtggctatatcgctggaattttctgtgcagcagtaagtcatcccgctgacgttatggtttcgttgatgaataacaacaaggaaggattatctgttgcacagttataccagaaaataggtttctccgggctttggaatggactagggatccgcattgtgatgattggaactctcacagggtttcaatggctcatctatgactctttcaaagtgtacagcggtctgccgactactggaggacattag

SEQ ID NO: 4273 - DNA, 1089 bp, Artificial Sequence
  Optimized genes for Pichia pastoris
atgttgttcccaagagaaacaacctgttctactgagtcagactttaatggggagcatatgggtgcgaggataagtagtgtatttgttatactcgttacttccatgttcggagctttcttccccatcctctcttcgcgttactcgttcatccggctaccggactggtgctttttcatcgcgaaatttttcgggagtggggttatcatcgccacggcatttatacatctcctccaacctgcaaacgaagctttatcggacgaatgcttgggcgagggcttcgaagactacccgtacgcgttcgctatagcccttgtttccattttcgttatgtgtttcggagagttaatgacttttaggttcatggatcacaaattggaagtggcggaagaaaaacaaatcaacgcggataaaatctcaaagctggagaacgaagaagacgacgaagtaggcacgggccttgatctgaacacacaacccgccccggaacctcaacaaatgaatcctgaaaatacgctggagaatcattttgcacaccaaaacgaacaccaagatatagagaacgtcggaactctcgtagataacaatctcgaatcatacaaatcccagttcatttcggtcctcgtcctggaatttgggattatatttcattctgtgtttgtgggcctgacgctcgctacttcaggggatgagtttaccaccttatatcccgtcatagtcttccatcaaatgttcgaggggctgggtctcggaacgcgcatcgctgccactccatggccgcacaatcgtcggctgactccatggttcttcgctttagcgtacggcctaacgacgcccatcgctattgccattggattgggggtacgtcacagctacgccgctggaagtagtactgcgctcatcacgaatggttgtttcgatgcagtaagcgcaggcatcctaatttacactggtctcgttgagcttatggcgcacgagttcatcttttcgactcagtttaatgggaagggtggcctcaagcggttgctgtgggcgtatgcgataatgtgcctaggtaccgggctgatggcgctccttggcaaatgggcatga

SEQ ID NO: 4274 - DNA, 771 bp, Artificial Sequence
  Optimized genes for Pichia pastoris
atggcagtcgggaaaaataaaagactttcgaaaggcaaaaaagggttgaagaagaaagttgtagaccccttccaacgtaaagaatggtatgatatcaaagcgccaacaacatttgagaatagaaacgtgggcaagacattgattaataaaagcactggacttaagaacgcggttgacggccttaagggccgagttgtagaggtaagtctggccgacctgcagggttcggaagatcattcgtttaagaagatcaaactgagagtagacgaagtgcaagggaaaaatctcctgacaaacttccatggttttgatttcacgtccgacaaagttaggagcttggtacggaagtggcaaagcctcgtcgaggcgaatgttactgttaagaccgcagatgactacgttttaagaattttttgtattgccttcacccgtcgtcatcaaaaccagattaaaaagacaacatatgcgcaaagttcgcagctatcagcgattagaaagaaaatggtggagattatgcaacgagaggtgtccaatgtgacactcgctcagttaacttccaaacttattccagaggtgatagggcgggaaatagagaaggctgccgaagggatttacccgctacaaaacgtccacattcggaaggttaaggtcttaaaacaagctaaattcgacctgggcgcattgttggcgctccatggggagtcagtaacggaagagaacggaaaaaaggtggggtcggagttccaagacgtcgttctagaaacagtatga

SEQ ID NO: 4275 - DNA, 987 bp, Artificial Sequence
  Optimized genes for Pichia pastoris
atggtagtggcaatcgaagggggtacgggactggggcttatgaacttgacctggaagccaacaccaacacccatcgacgacgctatcgagaccataagatatgccgtggaagaagccggtgttcgatatttaaatggtggagagttttacaactttccgttagatagtaacttaaacctccagtatattcaggagtttgctaaacggtacccagagctttataaaaaagtcagtctatccgttaagggtgctgttagtctggttgacgtaagtcccgactcatcacctgaaaaccttgaaaagagtatcagcaacatcactaaacacttaccgaataacttcctccctatatttgagccagcccggattgataagcgttactccatcgaagaaaccattaaaaacctctcaaagtttgttgaagatggtcgcattggtggcataagcctatctgaggtgggggcggatacgatcaggcgcgctgccaaggtagcgcccattgcgtgtgtcgaggtagaatttagtttattgactcgtgatatactgcataatggagttcttgccgcatgtgaagacttaaacatacctatcattgcgtattccccgctcggtcggggattcttaacaggtacgattaactccaaagcagatattccagaaggtgatatccgcctttcgttagaacgatttaatgacgacgaagtgattgaacacaatctgaaattagttcacggactcaagaagatagccgacaaaaaaggggtcacgttagctcagttatcgctagcgtggctgcgaaagtttggagacaaacatgtaaaggtgctgcctattccaagctgttcatccccgcgacgcgtcgccgaaaacacgaaagagatctccttgaccgactcggagttccaagaaattacggacttcgccgagagtgtaccaattaagggcggcaggtacaacaaggcatcggaagcggtcttaaatggatga

SEQ ID NO: 4276 - DNA, 1938 bp, Artificial Sequence
  Optimized genes for Pichia pastoris
atgccggctgtaggcatcgacctcggcacgacctattcttgcgtcgctcatttcgcaaatgatagggtcgaaatcatcgcgaacgatcaaggtaatcgcacaactccctccttcgtagcattcactgacaccgagcggctgataggggacgcagcaaaaaatcaagcagctatgaatccagctaataccgtctttgacgcaaagcgtttaattgggcggaaattttccgatgcagaaacgcaagccgatatcaagcacttcccgttcaaagtagtcgacaagggtggtaaacctaacatccaggtagaattcaagggagagacgaaagtgtttactcccgaggagataagcagtatggtcttaacaaaaatgaaagatacggctgagcagtttttaggagacaaggttaacgatgccgtagtcaccgtccccgcctatttcaacgactcacaacgacaagcgacgaaagatgccggactaatcgccgggctaaatgtaatgcgaataatcaacgaaccaacagctgccgcaattgcatacggactcgacaagaaggcggaaggagaaaaaaacgtactgatcttcgacttaggcggcgggacctttgatgtatctttactgtctatcgaagatggtatcttcgaagtcaaggccacagcaggcgacactcacctgggaggagaggacttcgacaatagacttgttaatcatttcatcgccgagttcaagcgtaagaataaaaaggacctgtcgagtaaccaaagggcgctccggcgactacggaccgcctgtgaacgagcgaaacgtactctttcatctagcgcgcaaacgagtatagagatcgactcattgtttgagggtgttgacttctatacctctctcaccagggcccgattcgaagagctgtgcggtgatttgttcagatcaactattgaacccgtagaaaaggtcctaaaagacgcaaaactggataaatcccaggtgaacgaaattgtactcgtgggcgggtcaactagaattccaaaagttcaaaagctcgtaagcgacttcttcaacggaaaggagcccaataggagtatcaacccagatgaggcggtcgcctatggtgccgccgtacaagcggccatattgtcgggtgacacatcgtcgaaaacacaagacctgttgttgctggacgttgcgcctctgtcactggggatcgagacagcggggggcatcatgacgaagttgataccccggaattcaaccataccgactaagaagtcagaaaccttttcaacatacgctgacaaccaaccaggggtattaatccaagtttacgaaggcgagcgtgcgaagacagcggacaacaatttgctcggaaaattcgaattgtcagggatacccccagctccccgaggtgtaccacaaattgaggtgacgttcgatatggacgccaatggtatactgaacgtcagcgcggtcgaaaaaggcaccggtaaggcacaacagataactataacgaatgataaggggcgtctgagtaaagaggacatcgaggcgatgatatcagaagccgagaaatataaagacgaggatgaaaaggaagctgcgcggatccaagcacggaacgcattggaatcctattctttctcgttaaaaaatacattaaatgagaaagaggtaggtgaaaagttggatgcagcggacaaggagtctttgactaaggcgatagacgaaacaacatcatggatcgacgaaaaccagacagccaccactgaggaattcgaagctaagcaaaaggaacttgagggtgttgctaaccccatcatgacaaagttctatcaagcgaatggcggggcaccaggaggggctgcgcctggaggctttcctggtgctgcaggagccggagcagaggcgccgggtgcagatggcccgacggtggaagaagtagactag

SEQ ID NO: 4277 - DNA, 906 bp, Artificial Sequence
  Optimized genes for Pichia pastoris
atgggggggctctcttttgagaggcaaagtacttcaattctcaagaacctcgacaatcctatcgaacaggaggaaatcaggacgcctgaacccgagatggaagtcaaggaaacagtcgagggtgtgcccatggcgttaagtggatctacatctagcactaaaagtaatcccgacattaacaatactgttgtaaatccagaaagcttggtcccaccgcctcctccggtggattcggttccttttaaattgaacaagcaaagcgtattgtcggattttctcaaacaaaatcgtctggcaacagaacggattaacgaatattcccccgcaattatagagagtaacggaactggtcagcaaccccacacgctatggatcgggtgcagtgacagcagaatatccgaagcctgccttggcgtaatgccgggagaagtcttcacccaccgtaacatttgtaatattgtaaactccaacgattttagtgttacgggggctatacagttcgccgtagatgtcataaaagtcaagaaaataattgtatgcggtcatactgactgcggtggggtctgggcagctctgagctctaaaagaataggcggggtgctcgacctgtggttaaacccggtccgccatgttcgtgcacaaaatagaaaagaattaagtctcataaaagatcccaaagagaaatgtgcgacgctcgccagactaaacctcatcaattctgtccaacaacttaaacgacacccatcttgcttggcagcccttaaaaaccaggacgtcgagatctacggtctgatgtacgatgtgggaaccggcttgttatccgaagtcgaaataccatgcgatgacgagttcgatgatgtatttcatgtgggcgatcatgatgataccgaggctggtggtcattag

SEQ ID NO: 4278 - DNA, 1440 bp, Artificial Sequence
  Optimized genes for Pichia pastoris
atgtcgctacaggaagccgttaaagaaatacaaagttcttttgatgtatcgcaggaggttctacagcgaagcgtagacaagttcatcgaactagcaaaaaagggcctcgcctcaaatgaggacaaattgggaatgcctatgctccctgcatatgtcacgcaagtcccttcgggtaaggagaagggcacatatctggcggcggacttgggagggacgaattttcgggtttgctcagtacaccttaagggggacaatacatttaacttagtacagcaaaagtcccccatccccgccgatatgatggtaggcacaggtgatcaattgtttgcttatctcgcttctaaaatcagaaaattcttagaggaacaccatggggatgctttggaagctgcccatgaaacgaattcacgagccaactatctaaaactcggatttacgttctcctttcctacggcgcaacattccctagactccggctcactagtgagatggacgaaagggttcaacattccggacgtggtagaccaagatgtagtgcaactgctacagaaacaccttgacgccggtaagatacccgttcacgttgcggcgctggcaaacgacactgtcgggactttactgagccgagcctactccgccaatgctatcgcaggcggcaaacagggcgagacaattatcggagcaatttttggtaccggtaccaacggagcatatttagagaagcttgataatataaagaagctgccagaggcggtagtaaaggaccttaaagctaaaggtgttactcatatggtgatcaatacagagtggggttccttcgacaaccgtctggaggtcttgccaacgacgaaatatgaccgcgatgtagatgcgctcacagccaatcccgggatacatctatttgaaaagcgggtttcggggatgttcatgggggaaattttacgtaacatccttgtagacttccactcgaggggtttagttttcacccagtacccgaattttgagagtctgccccatcgcctacgaactccctgggatttagacagtgagaacctctcgctgttcgaagtggacgatagtaaggacatgaagccaaccgaagtcaccctccttcaagcgctaagactccccacgacactggaagagcggcaggccatacaggctcttaccagggccataagtagacgatcagcttatatctcggcggtgcctattgccgcgataatcatgctcacaggagccctcgagggtcatcacatcgaggtggatattggggtggacggatctgtcgtcgaattctacccgggctataggacaatgttgagggatgcgctggctctcacgcaaatcggcactaagggtgagcggaggacgcatataaacatagccaaggatggatcgggagtcggcgcggccttgtgcgcaagcgtaagcatttaa

SEQ ID NO: 4279 - DNA, 354 bp, Artificial Sequence
  Optimized genes for Pichia pastoris
atgagcgatcagggtcgcaaagattttaccgataaagtatcggaagggctcaagcccgattctcagaagacttacttagagcaaacaaaggaaacgttaacagatgccggagacaaagcagcgaacaagctgacgccggaggagcaaaaaggattcggtcagcgagttggtgacgccgtgaaaaacggcaaagatgaagccgataaagaaacacaaccgactctggtagagcaagtacaaaatactgctggagacgctctggaggctgggaaagaggcactagcaaatacatcagaatacatctctggtgctttcagtggagcgaagaatggagccgatagtacgaagaaatga

SEQ ID NO: 4280 - DNA, 648 bp, Artificial Sequence
  Optimized genes for Pichia pastoris
atgtcggaggattatcgactggtggttgtcgggcccccatctgttggtaaatcagcactgacgatacaactaataaggggggaattcctaaccgagtacgaccctacaatcgaagactcatacaagcacccctgtgagattgacggtgcgcctgtgatgttagacattctcgacacagcaggtcaagaggattattctagtatgaaggagctatacatgaagaccggggagggcttcctcctcgtttttgcaattaataagcggtctagtctagaagaacttaaacccttttatgatcagatagtccgtgtaaaagagggcatgcaaagcgttcccatggttctagttggaaataaatctgatgtagaggatagtaagagggaggtgtcccgagatgagggagaggcccttgctcggcagttcggctgtcaatatatcgagacaagtgcgaaaacaaacaccaacgtcaaggaagctttttataatgtggtacgcgcaacaaagagcattaaagatacaaatcagacggggatcgatacttcggtagatcggtccaaaaatcatgagaaaccgactgtccgaggcaacgctactgccccagcctcgtcgtctgactcatcatcgtcgggatgctgtatagtaatgtag

SEQ ID NO: 4281 - DNA, 981 bp, Artificial Sequence
  Optimized genes for Pichia pastoris
atgaaaactcaaatcgactataagttctacccaaccaaagaagttacgattatttcagcgccattttctgcaggccagggaaaaggcggggtagaaaagggaccagggttacttttgaaacacggccttagagaagatcttgaggcccttggctggagtgtttcaattaaggagcctctaaagggtacgggtctcgatgttcccccgtcggagttagaagaagaattcgaccgatcgcatggtatcgcgaagcgtccaacagtggttgctcaggctacggagcgagtctaccgcgccgttaaagaagtctcccatcaaaaacgacttccgcttactatcggaggtgaccactccataggggtaagtactcttgcaggcttcctcgacgctaaccccgatgcgtgtgttctgtggatcgacgctcacgctgatataaatacaccggaaacatcgccatccgggaatatacatgggttcccagttgcattggctatggggctaagtcgtgaagtttggcctaaacaattttcatggctcgatgaagcgaagaataaactggccgcggaccgcatcgcctatattggtcttcgagatctagatccatgcgaaaaaaagcgcgttcgggaacttgggatagcggcatactcaatgtaccatgttgataaatacgggattgcaaaggtcgtggagatggcattagcaagaatcaacccgactggaaaatcaccagtacacattagctatgatgttgacgctctagatcccttattcacccccgcaacgggcacgcctgtgcgtgggggccttacgttcagagagggcatgtacatcgtcgaggccgttgccgagacagggaacctaggtgcgctcgatatcgtcgaatgcaatccagacctggcatctactgatgttcatgagatcgataccataactgcgggatgtgccattgcgaaaagcgcattcggagaaacactcgtctaa

SEQ ID NO: 4282 - DNA, 969 bp, Artificial Sequence
  Optimized genes for Pichia pastoris
atgaccgatgcggccgcccccaaaaaaccacagaagaataccgctgtagatttgctcgccggcggtacggcaggattatttgaggcactatgttgtcaccctcttgatacgataaaagttcgcatgcagctgtatcgccgaacgagtgctaatgctggtgtgaaaccgcctggttttatcaagaccggacttgggattgcggctaaagaaaccccaatggcactgtataaaggattaggcgccgttgtgattgggatcgttccgaaaatggggatcaggttttctagctatgagttttacaagcgacagctcgcagacaaggagggcaagaatagcacgttaacaacattcatatctggggtaggcgcgggcgttacagaggcctgtttggtagtaaatcctatggaggttgtcaagatacgtctccaagcgcaacatcatagcatgagtgatccattggatatccccaagtacagaaacgccctgcacgctggatacttgatcgtacgtgaagagggctttaagacactttataggggggttactctcactgctgcgcgccaagcgacgaaccaaggggtaaatttcaccgtttacagcaagattaaagaaagactccaagagtatcagcaactggaggttctccctagttggcagaccagtctagtgggtctcctaagtggtgcactgggtcccctgtccaacgccccgttggataccattaaaacccggatgcaaagagagacgggggtgactaatgagtccggggtagcacgtattctcagaataagcaagcgacttattcaggaggagggtatgagggcattgtataaagggataacacccagaataatgcgtgtagcccccggccaagcagtaacatttactgtatacgagctcatgaaagacgtacttgtgaagctaccgattataggaaacgaagattcccaagagttggtcatagagtag

SEQ ID NO: 4283 - DNA, 456 bp, Artificial Sequence
  Optimized genes for Pichia pastoris
atgagcgaagactgggactctgttacagtgataggtagaaaggctcgtgttggtgggagtgggccgcgggaaaatattgctcgcaccaagggcgcaataaatgaagcacgcagaacgggatctgtaatagcagttgaaaaaaagtatgggtcaggaaatagcaaatccgaccccgagggacagaaactcacaaaaatcgatcgggaaacagatgtcgtacctcctaagaaaattgatgcgaatgttgggaaagccatcagtaaagcgcgacttgacaaaaagttaacccaaaaagaactcgccaccaagatcaacgagaagccaaatgtcgtaaacgattacgaggctggtcgcgccgtccccaaccagcagttactcgcgaagatggaacgagtattaggagttaaactacgcggaaagaatataggtgacccactgttccctaaaaaaaattag

SEQ ID NO: 4284 - DNA, 1914 bp, Artificial Sequence
  Optimized genes for Pichia pastoris
atgcttagtgtcaggcggcaattgatgagtggccgctcctggtttagcactaccagcgtcgccaggaaggtatacagtgcgcagcaagacgttaagggtacaaacgcttccattgccatggcaaaggattaccatatcatagaccatgaatatgattgcgtcgtcgtcggagcgggtggggcgggactccgagcagcgttcggactagcgaaagaagggtttaaaactgcttgcatatctaagcttttcccgacacgctcacatacggttgcagctcagggtggtattaacgccgcactgggaaatatgcataaagacgattggcactggcatatgtatgatacagtgaagggaagcgactggctaggagaccaagatgccattcattatatgactagggaggctccggattcgatcatagagttggaacattacggcgtacctttctcccgtactgaggaaggccgcatctaccagcgggcctttggcgggcaaagtaaggagtatggtaagggcgggcaagcttacagaacatgtgcagtggctgaccgaaccggtcacgcgctactacacaccttatatggccagtcgctcagacacaacactcattttttcatagagttctttgcgatggatctcttaatgcatgacggcaagtgcgtaggttgtatcgcttataatcaagaggatgggaccattcacaggtttaaagcccataaaacaataattgctacaggagggtacggccgagcctattttagctgcacaagcgcacacacatgcacgggcgatgggtttggcatggtttcccgagcaggcctgccgctagaagatctagaattcatccagtttcatccaagcggtatctacgggtccggttgcttgattaccgaaggggcacgtggagaaggcggctttcttgtgaacagtgagggcgaacgttttatggagcgttacgccccaactgctaaggatttggcatgtagggacgttgtatcaagagcgatcacaatggagattaatgaggggcggggcgttggacctttgaaagaccacatgtaccttcagttaagtcacttacccgcgagcgtcctacacgaaaggcttcccgggattagcgagactgcccatatattcgcgggtgtagatgtcacaaaagagcccatcccaattttacccactgtccattacaacatgggcggtgtcccgaccaagtggtcaggtgaagcgctgactctcgacgaagacggtaacgataaggtcgtagagggattattggcctgtggagaggcgggatgtgcgagtgtccacggggcgaatcgcctaggagcgaactcattgcttgacttagtagtgttcggccgagctgtggcacacacaattcgcgactgcctaacaccaaatacaccccataaagagctgccggcagatattggcttcgaatcaatcgcgaatctggaccgcgtgcggacggcagatggagatatatccactgcggatttgcgccttgagatgcagcgtacgatgcaaaaacatataagcgtgtttcgcacacaggacataatggatgagggcgttaagcaaatcaacgaaatagataaaaagttcgccaacatcaaaaccactgatcgatcgatgatatggaattccgatcttgttgagacactagaattacaaaaccttctaacctgcgcaacgcagaccgccaagagtgcgagtgtcaggaaagaaagccggggcgctcatgcaagagatgatttcccggagcgcgacgatgagaactggatgaaacacagtttgtcgtggcaacataagagcggaagtcccgttgaattgaattataggaacgtgatcaccgagacgctcgatgaagctgagtgtaagcctgttcctcctactgttcgcgcatactga

SEQ ID NO: 4285 - DNA, 933 bp, Artificial Sequence
  Optimized genes for Pichia pastoris
atgcagatatttgtaaagactttgactggcaagaccataacccttgaggtcgaatcctccgatactatcgacaacgtgaaatcgaagattcaggataaggagggtataccccctgatcaacagcgcctaatcttcgctggcaaacaattagaagacggaaggacactcagtgactacaatatacagaaagaatccacactacacctagtcctacgattgcgtggaggcatgcaaatctttgtgaaaaccctcactggtaaaaccatcacgctggaggttgaaagttctgacaccatagataacgtgaaatcaaaaatccaagacaaggaaggcataccccccgaccagcaacgtctcatctttgcaggaaaacagcttgaagacgggcgtactctctcggactataacatacaaaaggagagcacccttcatcttgtgttacgacttcgggggggaatgcagattttcgtgaaaactctaacaggcaaaacgatcacactagaggtggaatcgtctgatactatcgataatgttaaatctaagattcaagataaagagggtatacctccggatcagcagagactcattttcgccggtaagcaacttgaggacggtcggacattgtctgattataacatccagaaggaatcgactcttcacctcgtgttgagacttaggggcggtatgcaaatttttgtgaaaacgctcacaggaaagacaatcactctagaagtggaaagtagtgatactatagataatgttaaatctaagatccaggataaagaagggatccctcccgatcaacagcggctcatctttgcaggcaaacagctcgaagacgggcggaccttgagcgattataatattcagaaagagtcgacccttcacctcgtacttaggctgcgtggcggcgagctatgtagcatcgtttag

SEQ ID NO: 4286 - DNA, 1866 bp, Artificial Sequence
  Optimized genes for Pichia pastoris
atgggcaaggattacacacccctcgtagcaaccattgacatcggaacgacaagcacaagggcaattctattcgactatcatgggcaggaggttgctaaacatcaaatagaatactcgacatccgcacaggatgatatcaaacggaaaagaagccagatcatttcttctgaaggcatatcgcttacagtctcagatgacctcgaggttgagtcagtagataacaaggcagggcccaccttacagttcccgcaaccgggatgggttgaatgtcgtcctagccatattctggccaacgcagtgcaatgcttagcggcttgcttggttacaatggaaaataagaatctggaccgggatgaaaagaacaagtacaagctaatatctattggtgttgcaaacatgagagagacaactgttgtgtggtccaagaagaccgggaaaccgctatataacggaattgtttggaatgatactaggaataacgacattgtggatgaatataccgcgaagtattccgaaaaagagagggaggagatgcgtacgttgtgcgggtgtcccataagtacttatttttctgcgactaagtttagatggcttttgaaacatgtaccagaagttaaacaggcttatgacaatgcagatggagatttaatgttcggaacgatcgactcatggcttatctatcacctgacgaatgagaagagtcatgttactgatgttacgaacgcctcgcgtactaactttatgaatattgaaacgaacaagtacgacgaccgattgttgaaattttgggacgttgacacctctaaggttatccttccggagatccgctcgtccgccgaggtctacggacatttcaaggttcctcatttggagtcaattggatatgttgagtcgtacttaaccgatgacgcactagccctacttgaaaccattgaaggcgctccattagctggctgtttgggtgaccagtccgcgtcgttggtggggcaattggcagtacgtaagggcgacgcaaagtgcacatatgggacaggtgccttcttgctgtacaatacgggggaccaaactttgattagcgaacatggggctctgactactgtgggctactggtttcccggtctggatgagtccgaggacggcaaacatagcagtaaaccccagtacgctctcgaaggatctatagcagtagcggggtctgtggtgcagtggctgagagacaaccttcgactcatttccaaagcgcaggacgtcggtcctcttgctagtcaggtagacaacagtggtggcgtggtattcgtaccggcgttttcagggctatttgcgccctactgggactcaaattctcgcggtactatattcgggcttacccaatatacgtctgcgtcacacattgctcgagccgctttagaaggagtgtgtttccaaactagggctattttaaaagcgatgatcagtgatgcgggagcatccgcagactttttagaggagtcgagtaaggccacgggacataacccactatcggttctcgccgtagacggggggatgtctaaatctgatgagatgatgcagatccaagcggacatacttggaccctgcgtgacagtccgacgctccatcaatcctgagtgcacggctcttggcgcagcaatagctgcgggattcggagtaccgaaagaagaccggatatggggttcactgaaggagtgcactgaggcgatcctagaagggaataaaatgtaccttgcggccggcaacacatcattggactttaaagctactctttcggatgaagtgagacgaaaagaatggagactgtgggagaacgccatagcaaaggctaagggctggttgaaggacacggcgtaa

SEQ ID NO: 4287 - DNA, 1116 bp, Artificial Sequence
  Optimized genes for Pichia pastoris
atgagttcttcggagattatcgaaaacactgcgctattacaaaaatatcagtcactggatcaacgtggaaagattatcgctgaatacatatggatcgatgcatcaggtggcattcgatccaaggggcggactttatccaagaagccttcgagcatcgatgacctacccgaatggaattttgatggttcctcaaccggccaagcacccggacatgattcagatgtgtatcttcggccggtgtcatattacgcggatccctttagaaggggagacaacatagtcgtgctcgccgagtgttggaacaacgatgggacgcccaataagttcaaccaccgacatgagtgtgcaaaactgatgaaggcgcataaagatcaagaagtctggttcggcttggagcaagaatatactctccttgataagtacgacaatgtttatgcctggcctaagggcggttttccggctccccagggaccctactactgtggcgtagggacgggcaaagtttatgcccgggacatgattgaggctcactatagagcttgcatccatgctggaattaatatctcaggcatcaacgcagaggttatgccgtcacaatgggaattccaagtaggcccgtgcaacggaatcgacatgggtgaccagctttgggtcgcgagatatttgctccagcgggtagcagaggagttcggtattaaaatctcgtttcacccgaaacctctgaagggggattggaatggtgccggttgccacaccaacgtaagcacctccgccatgcgcgtccctggaggaatgaaatacattgaggcagcagtcgagaaactagccaaaagacatcttgagcacatagctctttacggatcagacaatgagcaaaggttgactggtagacacgagactgcgtccatgacctctttttcgtcaggtgttgcgaataggggggcgtctattcgcatcccccgcagtgttgcaaaagaaggctacgggtacttcgaggaccgccggcctgcctcaaatatcgatccatacctggtaaccggaattatggtggagactatttgcggagccattccggacgcagacatgacgaaggagtataaacgggagtccgattga

SEQ ID NO: 4288 - DNA, 465 bp, Artificial Sequence
  Optimized genes for Pichia pastoris
atggttaaagctgtagcggtgcttcgtggggatagcacagttggcggcaccgtcgtctttgagcaaagtagtgaatcatcgccaaccacaataacttacgacataaaagggaactctccgaacgctgagaggggattccacatccatcagtttggagacaataccaacggctgcacgagcgccggcccacatttcaaccccttcggaaagacacacggagcacccaccgacgaagctcgccacgtgggcgatctagggaatgtcaaaacagatgcagagggggttgcgaagggcgtaatcacagacaatcaggtcaagcttattggcgagacttcgatattaggacgaacggtcgtcatacacgacgggaccgatgatctgggtaaggggggtcatgctgacagcctaaaaacgggtaatgcggggggtcgacctgcatgcggcgtaatagggttggcggcatga

SEQ ID NO: 4289 - DNA, 1029 bp, Artificial Sequence
  Optimized genes for Pichia pastoris
atggtaaaagttactgtgtgcggcgctgccggggggataggtcaacccctcagccttatgtttaaattaaatccgtacgttaccaccttagcattgtatgacgttgtgaacgtgccgggcgtaggcaaagacctctctcatatcgataccgatactaagctggagtcatatctgccggaaaacgatggacttgagaaggcgcttacgggtagtgacctagtgattatccctgccggggtcccacgaaagcccggcatgactcgagatgatcttttcgctataaatgctgggatcatccgagacttggccaatggaatagctcaattcgctccgagtgcgtttgtactcgttatttcgaacccagtaaatagcacagtacccatcgttgctgaaatcctgaagaagaataacgtattcaacccgcagaagttattcggtgttacaacacttgattgtgtcagagctaacacgttcgtagcagaactcagcaaagacaaagaggcctctgcattcgatacccgtgtattaggagggcactccggtgaaacaattgttcctgtattctctcaatcggcaccagaggtctataaagagctttccgacgaacaaaaagctgctttggtacatcgagtgcaattcggtggagacgaagtggtcaaagcgaagaatggcgccggatcagcaaccttaagcatggcttacgccggatacaaattggggcacgcccttctagctgcgataaatgacacgccgaatatcattgagtccactttcgtctatttgaaggactcaaaaataaaaggcgccgcggaggccttcaaatacatcaacgaaaaacttaaggatagtgattccagcgacgtcgacttctttgccttgcccgtggttttgtcatcgaacggtatagaagagatcaagtgggatattttggagaaggttgacgcaaaggagacagaactcctaaaaatagcgacagggcagctctccaaaaatatcgcaaaagggacagcctttatagcgggaaattga

SEQ ID NO: 4290 - DNA, 1878 bp, Artificial Sequence
  Optimized genes for Pichia pastoris
atgagtaacacgaaagagaccggcttgtttgagacgggatccacctcatctgaaaacgagaaacagtcaatttccgataatgagattgcagagagtttagaccagcaaaacatcttaacgcagtatagcgaagaagacgttatgtcaatgggcagaaattacgccattaagcatgggctcgatcctgacttgttcgccaaaggagctgctattgcaaggaacccgattggttacaatcggatggaatttctttctcaggaagaaaaagaaattttgtaccaggaagagcaccagaagtggaaattaccgaagaaactgtactacctaatcattatggcctctatgggggcgtgtgtacaaggcatggatgaaagtgtaattaacggggctaatttaacttaccctgcgggacttggtataggaagcgactcggaacgtgattcttggcttcaagggttggtcaattcagcgccttatatatgttgcggtttaattagttgctggatgacggacgcgtggaacgcacgcctagggcgcaagtggactatattttggacatgcttcattagtgccataacctgtttctggcaaggcttttgcaatacttggtatcatctgttcatagctaggtttatgttaggatttgggattgggccgaagagcgctaccatacctgtttatgcggcagagtgcgtccctcacaagatcagaggggcactagtgatgatgtggcagatgtggacggctttcggaatcatgctcgggtatgttttttcgttggctttccacaaagttcctgaccatggtattgggggtggggggctagcgtggcggttaatgctaggttcagccatgttgccagcgattgtcgtttgtctacaggtgtggtcttgtccggagagccccaggtggctgatgggcaaggaacgacatgcggaggcatatgagtccctcaaggtcttgcgcaaccacccggtgcaagctgctagggacactttttaccagaatgtcctattaatggaagagaattcctatacttctatgggattttttggtaaactgaaggaaatggttgtggtccggcgcaatcggaacggggccatgggagcgggcatcgtaatgtttatgcagcagttttgcggcataaacgtgatcgcctattatagttcatcaatattcgtagagagcggatttactgaaacctccgcattacttgcctcctgggggtttggcatgatcaactggctattcgccttgcctgctgtatttacgatcgatctagccgggagacgcacgttgctactgatcacatttcccttaatgtccatgatgctgttgttagcggggttcagtttctggatccccgaagagaacgagaaagcccgtgtcggggttgtctcactgggcatctacctttttgctgccatatacagctcaggcgaggggcccgtccccttcacctattcagctgaatgcgcgcccctgtatatcagggacgttgttatgtcgtttgccacggcaacttgctggttttttaattctgtgcttgcacttacgtggccatcgctgaagaatgcatttaaggttcagggggcgttcggattctatgcggcatggaacatcgttggttttttcctagtcttgatgttcctacccgaaactaaagggctgacactagaggagttagacgatgtctttgacgtaccgacttggcaacacgcttcttaccaattgaaaaaaatgtggattaatatacagagaaatattatccgtaaggacgtagaacccatgcctcctctgtataagcaccatagaatggctttaacgaacgcacagtgggaggaaaagcacgaggtggaattggttgaaaacgtatga

SEQ ID NO: 4291 - DNA, 4512 bp, Artificial Sequence
  Optimized genes for Pichia pastoris
atgagtagcacgtcatcttcgatcaatgataaagataaggaatcgtccaatattgattccccgaaggacaccgtgccgtatgagcccactcgcttcgttggggacctcgagaaccaaaacgaggacgatatatattcagaacagctaagtcggatcctaacccagtcagaagccgttcaaaaaatccaatctctagcgcgaactatgagtcgtatgaccaaaaaagaattagcagctttcgaggtcaaccaggacgactttgacttgaagatccttttgcactacttgcgcgcaaaatcagaggaacagggtatagaatcctgctcagcaggcgtagccttcaaaaatcttaccgccactggtattgatgtttcagcagcttatggcccgacagtagacgagatgctccgaaatttttttatgtggcccatccgatttgctaagagagaacatgtcaagacccgtcaaattattcggaattttacaggcagtatcgaggcgggcgagctatgcctggtcctaggacgtcccggagcaggttgcagtacattattgaagtgctgtaccggtaatacgagcgaactattatccgtggaaggggagttttcctacgacggattagaccaggccgagatgatgaaagattataagggatacgtgatatacaatcccgagctagatacacattttcctcatataactgtgaaacaaacaatagacttcgcgttgaaaatgaagacacctgcgaaacgagttgacggaatcccacgtaaaaagtatatagacacaatgagggacttgtggtgcaccgtattcgggctacgtcatacttatggaacgaaggtgggcaatgacttcattagaggtgtgagcggtggggaacggaagcgtgtgtcaatcgtggaagcactcgctactggggcctcagtttatgcctgggataatgcgacgcgcggcctcgacgcaagcaccgcgctggaatttacacaggccattagaacatctacaaatctactcaacgcctccggcatggtcgcaatatatcaggccggggagaatatttatgaactgttcgacaaggtatgcgtactttacaacgggaagcaggtctactttggccctgccgagaaagcgcgtaaatatttcgaagatatgggctggtacaaaccgcctaggatgaccacaccagaattcttgacagccgtgaccgatcctagtggcagatttattagggaaggattcaaaaataaggtgcctgaaaattcggaggattttgaacaatactggttgaatagcccggagtaccaagagtgtctacgctcccatgaccagtatatccaggatcataatccagaggagacaaggcaaaggttggcaacagcgaaatcgcaaactcgccagaaggcagtccgtagcaaatcgcgttttgtcgcttcatatccgaatcaaatagcctactgcgtaactcgtggctttcaaagaacaaagggagagatcgcatacacattggtctatcttagcagtttcctaactaagggttttattgttgggtctatgtactggaatatacccaaggacacatcgggtttgttctcgaggagtggcatcctgttttactgcctgctgttttgcgcggtaacgtcgctttcagagataagccatacctataccaatcgtcctattattttgaaacagaagtcgtattctttgtaccatcagagcgctgagagcctacaggaaataataacagaattaccgacaaagttggttgccgtgattattctggcgctcaccacatactttatgccaggactgcggctgagtgatggcggctccgcattttggatgtacctgctatttctcttgcttatacagcagtgtatgtccttcatgttcaagctcatagcaacgctaacccgagacgccggtaccgcgcacgcgtgtggtggactactagcgctcatgatgtgcgtgtatactggttttatcattccgctaccttacatgcatcattggattaaatggtttaactggatcaacccgatgcgatactgctatgagtccttactggctacggagctccattcacgcgaaatgaaatgctccgaatatattccgaacggaccagactacgagggcatcagtatggaaaactctgcatgcactaccacagcctacaatcatacgacgggcctagttagcggaaatgcgttcctgacggcaacttataattatcgctactcacatgtgtggaggaacttcggaataaatattgcctggacggctggcttcattattattaatacgatattaagtgaattcgttaaaaatgtagaaggtggaggtgatatgcttttatataagcgcggtcacatgcctaaggaaggaatagaggcagttgatggcaaggttgcatcaaagcaagagatgatggaagccctgaatgggccggatgtcgacttgaaaaaagtaatagcagaacgcgatgtttttacgtggcaacatctggattatgttatcccatatgggggggcaactcgtcaacttttaaatgacgtacaaggctacgtaaagcccgggacgatgacagccctaatgggggagtcgggggccggtaaaacgacattgctaaacaccctctcacaacgaataaattttgggactattactggggacatatttgtgaacggaaggcctctcgattcgagttttaagaggcgtaccggcttcgtccagcagtcggatcttcatcttgccgaatacagcgtccgagaatcactccgtttcgctgtgaacctgcgccaatccgagaaagttcctcaggcggagaagtacgagtatgttgagaagataattaacttattagggatgcaaaattacgcggaggcgatcatcggaaagatagggcgggggcttaacgttgaacaaaggaaaaaactaagtatagcggtagaactggttgcgaagccgagcctgctgctgtttttagacgaaccaactagcggcctagattcacaatctgcttggagcataattcaatttttacgggcgctgtctgactcgggccaggctattctctgcaccatacaccaaccatccgccacgttgttcgaagtctttgacagactactgttgttgaaaaagggaggccgaactgtgtatttcggtgatataggccctaacagttcaactatgttaagttatttcgaacgtgaaagcgggatcaagtgtggagttagcgagaatccggcagaatacatcctgaattgcataggcgcgggcgcaaccgcacacgcctctgcagattggggcgatctatgggtttcctcgcctgaacatgcggcggtcacagaagagattagtcgcttgaacacagaactacaaaaaagacccctcccagaaaacatcgaggatcttcagtccaagtttgccacgagctatcctcatcagataaagattttattcttgcgaacgatggtacagttctggcgatcacctgtttacatacgcgcaaaatttctcgaggcggttgtatgtgcaatatttgtcggtttcagttttgttaaggtcggccacggcctgcaagaagcgcaatttggtcttacgagtattttcatgatgctcattatctcgttggcaatgataaaccaaatgcatgtcttcgccttcgatagccgggaattattcgaagccagggagtcggcgagtaatacatttcattggtccacgctcttacttgcgcagacatggtgggaaaccatctggtgcatggcctgtcagtttctttgtttcgtttgctactactttccagctggctttagtggtacggcccatcatgcaggctacttcttcctgcagtttgtaataatattcccgatctactattgttcgtatggactctgggtgctgtacttcagtccggatgtccctagtgcgggcatgatcaatagcaatttcttcgccgccatgctgcttttctgtggagtcctgcagccgccgcaatttatgccgggtttctggacattcatgtataagctgagcccgtatacctacttcgttcagtcttttgtcgccccgctagtacacaaccgtaagcttgtgtgtagaactaacgaatatacgctaattacccctccggagggccagacctgctcagagttcctagaccctttcatcgaatccgacggcggatatttaggaaaccccgacgctactgagtcctgtgaatattgtccatatacgtaccaatcgcaggtgatggagcaattcaatataaaatggtcttaccgctggcgcaactttgggttctttttcgcatacataattttcaactatgttgcacttttaagctgttattacctgatgcgagtcaaggtctggaacatgaaaagtatattgaactttaaaaagtggttcaatgggccccgcaaagagcggcatgatcctgagaccaatatctttgcggcacagccggctgatgctaaactcgcggttctaaagaaaaaagaatga

SEQ ID NO: 4292 - DNA, 396 bp, Artificial Sequence
  Optimized genes for Pichia pastoris
atgatgacattactgcagcttttggtactggtttatatcatatacaaggtatttcctatcttaagaagattcttttcaactggaactatggtgagtgagcaagtcttgtccaagactaaagcgctaattaaagaccacaaagtattcgtggcaagtaagtcgtactgtccttactgctctcagacgaaaaaattattggagtcactgaatgcaaatgctttcgttgtagagttagatactgagcccgacgggagtgatatccaggcagcgctactcgagttgactgggcaacgtaccgtaccgaatgttttcatcaatggagagcacgttggagggaactcagatctgcaggcgctaaactctgagggcaaacttaaaacgttacttaaaaactga

SEQ ID NO: 4293 - DNA, 963 bp, Artificial Sequence
  Optimized genes for Pichia pastoris
atgcctgccattgtggatccatcctttcagactaatcacgtgtgccttcacgtctcggatatacagaagagtataaagttctacacggaatacttcggactttcgctattagcgcaggagtccgtaccccagctcaagaaacaaatatacctcttagggtataactcgccgagtaacgcaaattacggaaaacattgggcagatcgtagtggcgtactagaattatgtgtagatcagacattgcctaaggactacaagtttgcgaatgggaacagtccagaggcccaaggtttcggtcacatttgcgtcgcggtcgataatttggaaaccgcctgtgagcagctcgaaaagaacggagtagctttcaagaagcgcccatcagagggccggcaaaaggatatcgcgttcgcgctagaccccgataactattggatagaacttatagaacatcaaatcgggaaaaaagatggcgtcagcaacaagtctaattgggtattaaatcatggaatgtacagaatacgggaccctaaggtctcgcttaagttttacaaggaagttttaggcatgaaactttacagtaccagagagtttccagaggcaaaattcacattatatttcctgggatacgaacatgatgatcaatacgtagagaatcaagagaaaccccggcctcaggctgaacgtgagtctattatcgagctgacacataattggggtacggagtctgatagttcttttaagggataccatacaaacactacggagcctttcgggtacggccacaccggtattaagacgaaagacgtagctaagctagccaaggagttggagaatgatgtggagtgggtttttaagctgggggaaatatcagataagttggcattttttaaggacccagacgggtacctactcgaaatattacaaaatgatagtttcctgaaagatcagggcaacaaactttaa

SEQ ID NO: 4294 - DNA, 198 bp, Artificial Sequence
  Optimized genes for Pichia pastoris
atgcagttcaaatctattgttcttacgcttgcagccgtaactgtagctcaagcaaataatctgagtaacgagtcgaacgggacaaatcacagtaaccacacttcgtctgttccgacgggggcggctgtccgggccagcggtatgggtgccggtctcttaggcgcgggtgtggtggcgggagtagctctcctaatatga

SEQ ID NO: 4295 - DNA, 1056 bp, Artificial Sequence
  Optimized genes for Pichia pastoris
atggttacaaaagagtcaataatatcagatttagaaaaagaaaatgtcggtccggagtttggagagtttctcaattcactccagacggatctcaatagtgaaaagcctttaattgagcaagtaaaaagccagctcgaaacacactttaaccttgggccggaaacacaggaattctctcgcaaaaatgacaatgcgcccgtagatcaacttttgactaattactataacaactacgaggttaacgtgctagagttcgtgctccaaatgggattctgtaaagatttgtcgatacctctgaatgtttggtttgtgctcgatatgatttcacagctttctacatcgaaacaggatttacctcttgattattaccttgttctaaataacagccacactggcaagtattcggatttcgtccgataccttatatacgaggccgtgggggcagagatacactgcttcgaacaaggagatatgccgcagcagtataggtcatctcggtgggaagataaagtcaaaggaccggccttggccaacaggggaccaattaggggaaatgtgggtgctggtgacaggaagattaccttccacttgttatgtaagaagaccgcgagaatgatcctggtaggggatgatcgggaaactgactttgaaatgtctgatcgttcattcgtaacccttctcctcgattactaccagcgcgtcggaactacgaaaaagatcgatcttctcttgctaacgaacaattacgataccaacatgaataacaagttacagcaattgaaaatcctcgaatccctcaatatgttaaaatctaattgttacgttttagattatcaaataaccgccgatcaagtgacagcaaacttcaactcctatgtagaagggatcccggctttccgtcgccacgaaatagcaaacttcttgaagaaacgtagaaccccaaaaaatgccgacgagctaatctttaagtacgtgggccgttggaacatatgttaccaaaaaaagtttcaccaagggaacatatcgatacatcagatttccgggtacttagattga

SEQ ID NO: 4296 - DNA, 1347 bp, Artificial Sequence
  Optimized genes for Pichia pastoris
atgtctgctcccttaagcccattaattcaacaaatggtgtctctcatggaagcgcgtactaatggcgctgatccggggacaggaatcttacctcggttgaatagtgcggccgacatgttaggcggggtggaccgtataccccgtgagctcatcaattacgtccaaggaaagcagctcgctttgtttggggattatcctagtggaaaggacacagctccttcagctattttcatggttgtatttttttttattttccttgcccatttgacactatttgggatcaactggtcaagaggccataaattcctattaagctttgggtttgcgttttacgcccttcttagggtcgtgggattcgcgctccgggttgcgtggtcgcgcgaaatcacacgtgttcaagttggtatcgcatctgaggttttcttaattattcctactattctgttggcatcatttaacttaattcttgcacagcgtttatttacgtggcgtcatccttacgtgggctcttccaagttgttttggggggccttgctaacagtttattccgtggtgattagtgttgtagtcatgaccattgttgcagctgtcgtaccttacgtgtaccttcttagtcatagaaactatgagatgagcaaaaacgtcgttaaggtttcttccatactagtgatcctctactcactcctagctaccggcctgattttagtttcatatctttttaaacctaccaaacgggacaaaggttgccttatatatcaacccacgtggctggaatcgttcagtccaacgtacttcccactcaaagacagcgcgaaacaacatgagcagatatttatcggccgtaatggggcggccgctttcgcttctacgcgaataattgcaagctcttatcattataatgcccagtccgatgtattgcctgagcctactgctgagaatcttaaactcgagccagggaacgaggataatcttgttcgctattccagttctacagggcagttgaagcataattactctattattatcgtaaccttgaccacgacatttatactaatcggagccgtttttcgtgccatcacttgcttcctcgaccgaacggtggaaactcaatcctggatttttaaaccggttgtaatgtacatgctctggggattccttgagacggtaatcaacgtaatatacctgctgggccgaattgacttaagattctatagaccggaccgctttcccaaggatatgctggttggtaacgaagcagttgagccttcacccgttattagcaacaaggagcgcacatcaagtatctctgaaagaacttcgaaccctgaaattgttagaacggtttga

SEQ ID NO: 4297 - DNA, 378 bp, Artificial Sequence
  Optimized genes for Pichia pastoris
atgagcgaggaagaagagttgaaagtgttcactttcgaagaagttgaacaacataaggccaatgatgattgttggatagtttacaatggaaaggtctacgacgtcaccagttacatcgaggagcatccagggggcgaggaggtgatccttgaatgtggaggtgccgatgcaactgaacctttcgatgatatcggccactcagaagatgctcacgagatcttagcaaagcttctcttgggacgagtcgaaggcgctcctgtgaaggccagtgtctcgagcgcgtccactgccgaggactccggctcctctaacaatctgctcctggcggtcctggtcgccatactagctggtgtcgcatattatttttttaaccaatga

SEQ ID NO: 4298 - DNA, 879 bp, Artificial Sequence
  Optimized genes for Pichia pastoris
atgccgacacaaattatggcgccctgggcgcctgcacttgctggctccatcgcccgtgaactggagaaacagccattcgtctcgttccaattcgctactgtcgacgagcatggatcgccacacgttcgaacagtgattcacaggggttttctttttgacgaccgttcgactaatgtgttgacgttcaccacggacagaagaatgactaagtacaaagagcttttcaacgattcggctttcgaactttgcttttactcgcatgtggctaggaagcaatttcgcttgcggggagttgcacgatgcatcgacgacacgactactcccaagctaaagctacctcctgatattttcgatcaactgaagaattctgcagaggcaactgttacactgattgcggacaatgataacgaaattgagactgataagatcgactatttaaagtttccgcgttcgactgcatctgatgagttagaataccccctgctatcgcctgaagtcatcgcgaaacttgaggcatccagtggagaagaaggcttagatccggaagaaatcagtgcgcagcttaccccaccgacggaggaagagtggaaaaatgagaggcgccgtatttggaatacattgtcccgtagcataaagagcacattcaggaagcccacgcctgggtctaggctgacggaggaaaagattaagttactggacagcataggacgtggagtagacggtgcctctgacgaagatggactagagaacctcgtggttgtggtgctgttcgtggacaaagttgatttcgtggatatagggtacaacggccaaggacggcggctcatctaccgaaggctcgctggcgaccattggcgcgagacagctgtctgtccttag

SEQ ID NO: 4299 - DNA, 1380 bp, Artificial Sequence
  Optimized genes for Pichia pastoris
atgggcaaagagaaacttcacgttaacgttgtcgtaattggacacgtagatgcgggcaaaagtactaccactgggcacctgatctataaatgcggtgggatcgataaaagaaccattgagaaattcgaaaaggaagccgaagagcttggcaaaggctcctttaaatatgcatgggtcctggataagctaaaggcggaaagagaaaggggcattacaatcgatattgcactatggaagttcgagacacctaaataccatgttactgtaattgacgcaccaggacatagggacttcattaaaaatatgattacgggtaccagtcaggcagactgcgcaatcctggtcattgcgtctgggataggggaattcgaggcggggatttcgaaggatggacagacgcgcgaacatgcattactcgcattcactctgggtgtcaagcaactcattgtagctataaataaaatggattctgtaaaatggtcacagaagcggtatgaggagattgttaaagaaacatcgaatttcatcaaaaaagtaggctataacccaaaaactgtaccttttgtacctatatcgggttggaatggagataacatgattgagccttcatccaattgcgactggtacaagggctgggaaaaagagaccaaggcgggaggcgccaccaaggggaagaccctcctagaggcgatagacagtattgaccctccatcacgtcctaccgacaaacccctgcggttgcctctgcaggacgtgtacaagatcggcggaataggaaccgtgccggtgggccgtgtagagaccggtgtcattaaggcggggatggttgtaacctttgcgcccgcaggggttacaacagaagtaaagtctgtggagatgcaccatgagcagcttgagcagggtgtaccaggagataatgttggtttcaacgttaaaaacgtctcagtgaaggagataaggcgtggcaacgtgtgcggcgactccaagaatgacccgcctaaagccgccgaatcgttcaatgcgcaagttataatactcaatcatccagggcaaatttcggcaggatacgccccagtactagattgtcacacagcacacatagcctgcaagtttgatgagctaattgagaaaattgaccgccgcactggcaagaaaaccgaggagaacccgaagttcatcaaatcaggcgatgcggcgatcgtcaaactggtaccttcgaaacccatgtgtgttgaggccttcaccgactaccctccgttaggaagatttgcagtgcgggacatgcgccagacggtggccgtaggagttattaaaagcgtcgttaagacggacaaagcggggaaagttacaaaagccgcgcagaaggcggccaaaaaataa

SEQ ID NO: 4300 - DNA, 1674 bp, Artificial Sequence
  Optimized genes for Pichia pastoris
atggctccgaccgcgatagacttgcaacaggtgtctgatgaagactaccagactaagataaagaaggccacctctccatcctactccgtcatagcctccctaggcttgaatccggaggcggtgattcgtcacaacgcggcggtccccacgctatacgaggatggactgctggaaaaaggcaccgccatatcgtcgactggtgccctaatggcttattcaggtaaaaagacgggtaggtcccctaaggacaaaaggatcgttgatgaagagacctctactgagcatatatggtgggggcccgtgaataagaaagttgatgagcttacctggaaaatatcaaaggctagggccatcgattacttgaggacacgcgagaaaatctatgtcattgacgccttcgccggctgggatccgcgataccgtatcaaagtcagagtggtttgtgctagggcgtatcatgcgctttttatgaaaaacatgttgatccgacccaccgaagaggaactgcagaactttggggaaccggactttaccatctggaacgccggacaattcccggccaacgtacatacaaagggtatgacttccagtacttctgtagaaataaattttaagagcatggagatggtcattttggggactgaatatgcgggtgagatgaaaaaaggaatctttacggtcatgttctacttgatgccaatccgacacaaagttctaactttacattcatcagcgaaccagggggtccaaaataaggacgtgactcttttcttcggattgtcgggaaccgggaagacaaccctctctgcagatccgaataggaaattaataggtgacgacgaacattgctggtcggacaatggcgtattcaatatagagggggggtgctacgctaagtgtttggatttgtccggcgagaaggaaccggagatctttaatgcaataaaattcggatccgtactggagaatgtcggctatgaccccgtcaccaaaattgttgattactacgataagtccataactgaaaatactcggtgtgcatatcctatcgactatatccccagtgcattgatcccttgcacagtcgatagccaccctaagaatatcgtattgttaacgtgcgatgcgcgtggggtcctaccgcctatttctaagcttacaaacgctcaggtcatgtaccacttcatctcggggtatacatcaaaaatggcgggcactgaagacggcattacagagccggaagcaacgttttctgcctgctttggacaaccgttccttgtcctccacccaatgaagtacgctcagcagctgtctgacaaaatgatacagcatgaatctaccgcatggctgttaaataccggctggacggggtcgtctgctaccaaggggggctcgcgatgtccgctaaagtacacaagacgcatacttgactccattcatagtggcgaattggccaaagccgagtacaaaaactatcccacatttgggttacaaattcctaaggaggtacctggagtacctacagaaatcctagatccgtcgaacaattgggtggacggaaaggacaacttcaatacagaagtcaggaatctcgctcagcttttcatggaaaatttcgagaagtacgcctctgagtgcactaccgaagtcatacaagccggcccacagctctaa

SEQ ID NO: 4301 - DNA, 1071 bp, Artificial Sequence
  Optimized genes for Pichia pastoris
atgacgtttttcaggaggagcctccagagctctaagtccaacagtaccacatcaatctcctccctatatgccacccctaattccgtagacacactaacaccggagttcgttccggaggtcatcgacgatgaattaaactcccttcactttaaattcacaaactttgccctggatgatgaagtagttgacatagctagcgagacggcaaccgaagccagtggggttgctactatgaagacatcgccgagcttacgaactggctcggatgtcaagtggtgcgtgctgttagtcgggcttccagcatctggtaagtcgaccgtcgtccgacaattaaaacagtatctaactacgggcacgaagcagaagtgccgtgtcgaaatctacaatgcggggaacgtccgccgatctcagcacccgaagcgggccgattcgggtttttttgagttcggatctacttctaccaacgggcggcttcgggagaccttcgcccgagatactctcgccatgctcttaggtgaccttcagaacgatcacgtggacataggcatcctggacgcaacgaattcaacacgtgagcgacgtaagtcgttattggagcaaatccatgcggtgtccccctctacaaatattcaaactttaatcttggaggtccaatgcactaataaaagtatgcggcgatttaacattgagagaaaagcccagaacgccgattacattcatattccgagagatgtagctgtgaaggatttttttaaccgagtgcaggtctacgaaagtcactttgagccggtgagtgcacaagaattagcttcccttaagcttccttatctctctatgattaatgtgggcgaggaaataatttataatttcgaaaacgccaaacagaccgatttctcgttagaggatcctatttttttgttaatctgtagcttcgtgactgaataccgcacgcaatatgctccaacatatttaatgacgcttaagagcttttatgcctctgagtacgcgccgttggtgtcgacaccattggcatttgctgcgacttctgcagaaactgcctcaacgcaataa

SEQ ID NO: 4302 - DNA, 3966 bp, Artificial Sequence
  Optimized genes for Pichia pastoris
atgtcatcagaaaaagagtccccctctgagagcaaatcttctcaggttttaaatatcccaaagaatgagcgcgtaagactcactgtcagaaacctgcaagtaaccctaaaagcacaaaagaagaagcaatcattgctaaaacgcctacggaagtctgaaaaggacaacacgatagacgaggaggcgctcccgcagaagaaaattatatccaacgtgaacctagatctaaaggaaggagaattaatcgcgattttgggtgcgtcaggttcgggtaagacgaccttactcaatacactatcgcagaaggtgactaagaataaaagcttcctgttctctggaatgataaagtacaatgaaaacaccgacatcgaacgtatacgccacgcatacatgtcgcaaaccgacttcttccttcctaacttgacggtctatgaaaccttagattacgcagctaaactaaaacttcctcgaaattatacaaacgcagaaaggacggaacttgtagagtcaatcttggtcgagctcggcctagacagaattagagaatcaattatttgcaattccttcgggtctatctatatttcagggggagaacaacggttagtttcgatggcgttgcaattgctaaacaaacccggcttgttgtttctggatgaaccaacaactggtttggatgcaacctcttcgttcaggattatcactgccttacataaattgagccgaaactttggcatgaccatagttttgacgattcatcagccacgatatgaaatactcgaacaaatagaccgcatatgcattctgacgcggggatgccgggtaatatacaacggatcacccctcaacagtatcgaatacttcaagaacattgggcatgacatccctaggaatgtcaacctcacagactatctacttgacatatcgtgcaaggatagcagtagccccgaaaacgagagccagtctttagcgcgaatagagtatctggcgtcgaaatgggaaaaacatgaaccatccactttggatgaaggcgtcgaagttatggattcatttacccactcaagtaattcggaaaaagctttaacggagattgaaaagcgcataacgcttattaagcaaataagaatcctcactaaacggacttttatcctgtccttgcgggatcgtggcagcatgttaactttcaactttagtatattgattatgggcgtggcatgcgggtggttgttttttaaaccaccagcggacctcggagggataagaagcatagtctctcaggtctacgtggtgttggaactaattgggtttgttcccatgattctagagatcacacggttgtgggacttcgacggtcaagcttttctacgcgagaatagtgagggctacgtatctgtgacgggctggatcatcagccgccgcctcgcaaaattccccatcgaggattttcctactagcatattcttcgcgctaataacgtactttatgtttggacttaggaccgataatggagcgtcgaacttcttgatctacttcgtcgtcactttatttgtgaacctctgcgctgtggcgttggcaacactgtgcttcgcggtggggtcagattttgcgtcctcctccttgatgtgtaacgttatctatcagctgcagaactcctcgtgcggttatttcattaatgcaaagactatgccagtttacgtgcggtggctcaagtattgtgcccatttttggtacgccttcggttgcctcatgagtaatcaattcacagactggatgggggattgtcccacagaaggtgatgcgtgcgttgagtattccggcatttaccaactggaaatatttggctttggagagaactggatcaccctaccgatctgcgtcctcctggcgttcttccttgggaccctggtgttatccggttttatactacgttataaaaataccgaggtgtccatgtcaaaggagataacctctaacatgttcagcaaacggagcaaggaccgaaagaaacatgaggaaaaagatgtacccgcagacgataattttcacgccatctccaccgcaaggagggaaatctcgcttaatctgtatgtctctaatgtaagcctatatgtctaccccagccgactcaaccttggtgtttttaccatcttgtggaaatacatcaacaacaggtatcttaagtttggagtagagaaagtggagaataccccgaaatccgcaaaatccaaacgtcttcttacaaacgtaaatgcaaagttcattcctgggcgactaaatgcaattatggggccgagcgggtctggtaaatcaacgctactcaactatattgcgggccggctctcgaaggaatctaacttttacactactggagaggtgatagtgaacgatattgccatgcgtagtatggacaagcccctgaaaaagttgtgttcatatgtactgcagaacgactctgctttaatacctactctaacggtccgtgaaacagttcactttcaagctcagcttcgtttgcctaaggaaaagcagattgacgggggcatcgatcgcatcatcgacgacctcctactaaaattcgggcttctagactgccaaaacatccctatcggggatgactataccaagggaataagtggtggcgaacgtaagcgagtgtcgatagtggtgcagctactagatgacagcaaaatcttgcttttggacgaaccgacttcaggactcgacagcttcacctcatcatcaattttgtcaaccctggaggagtacgcaatcgagcagaacaaattgatcatcatgactatacatcagcctaagaaagagatatttgagaaattcggtaatgtggttctgctagcccgcggaggctacgtagtatataatgatagtgcagttaagatagcggactatttcagttcactaggttacgacgtcccgcctatgacgaacgtcgcagacttcgtactagatatggtgtccaacaacatcgatgaaaggcccgaagaatctgacgcccggttacgtcgtttggtcgagacctggcaagagaaccatgaaagtgatttccaacgcgtgcaaacgaataccacgataaagatttccaacgaagatcaattcgatgctcagttctcgcacctctaccagaaccgggccgcggataatgtgtcattacctgttctgattaagaggttgacgcttaccaccttcagagatcaaggagtcgtagccgctcgattgtatcaggtaatggcgttatgcgtcattcatgcactgttctatgcccccctaaagaatggcgcggacgggatctctaatcgactcggtttaatattccaggttttaaacctttattatgccggatttatcaataacatatcattgttcccgcaggtcaaacagcttttgtataacgaatgggaagatcagatctactcgttagagagtttttttgccagctatttccttctagaaattccatttgaactcttctgcagctttttatacgccgtattcctagtgatggtcattggattgcctcgtactgccgggatgctgtttactacattctatgcctcttttgtggctatgaactgcggggaatcatttggcatactctttaataccctgttcaataagttagacgtggctattaatgtcttgagtaattgccttatcattggaatatttatggcaggcgttatgtcaattcacatgccggaatttttcaaagcgtggaattggataaacccgctaaaatatatagtaggggtcgttgcaaaacttggatttgctggtcaaacctttaaatgtgagatcggagacgaatgtgcgttatctacgggggatgatgtcctccgatattatcggcttgatcacaacttctctgcattcatgggtgccctcgctgtctgcttcgtggtataccgtttcgtcagttatgtctttctcgcgatcagactaaagatgtcgtga

SEQ ID NO: 4303 - DNA, 1212 bp, Artificial Sequence
  Optimized genes for Pichia pastoris
atggctggaaatcttaaggacatcctgtctctttcccgaaagacggcccggaatctaaagcaagccctggatgagcttgcagaacaggttatcaaccatcagcgaaggaggcctgccctcgtgcgggtaccgatcaacaataatttgcgacgaaagtcccagcaatcctttttgaatcgaaggtcgttccatctttggacttcaaaatataatccgtatttttggcgtggggggcgatctaatgtattggaccagctgaatagggaagcgttaagataccgctcctcgttcgccaagcccggtttctaccccagcggattataccagagcacttttccccagcgcgggagcagaatgttcagcacatgcgcctactcttgccaacaagaagcagtaaaaaatctaacttctgctgttcgtgcgttgctacagtccggggcgaactttggtagtcagatgaaacaaatgaagcactgtagccaaaaaaagaaacatttttctaaattctctaagcgcctcacgtcgtcgactgcggcggggagcggtaaaaacgctgagcaggcgccatccggtctggctgaaggaagtgcggtagtcttttcgctggaacggcaatctcataacactgagttagaaggcatcctcgatcaagagacaagctcaatcctagaagaggagatggtgcaacacgagcgtcatttagccatcatccgagaagaaattcagcggatttcagaaaatctcggttctctaccgctgataatgtcaggccacaaaatcgaagtattctttcctaattgtgataccgtcaaatgtgagcagttaatgcgggatttggcaattacgaagggggtggtgcgtcggcatgactcaactgcagagcacagttccagtcgatcgtttgtgccagaggactgcctgtactcgtcagggtcgagtagccccaacccgctgagcagcaccagttcaaaatcctttgatcgagttagtcttgactacattagcagcaggtcaacctcagaccaaacgacgggatcggagtacacgagcctaagccaacaataccacctagtaagcaactataatccggtcctttctagtgcccccggctccagccgtgtgcttgaattaaacacaccagagtctaccatggaagggtcaacagatttggaatatttgacacgtgacgacgtactgcttttgaacgtctag

SEQ ID NO: 4304 - DNA, 336 bp, Artificial Sequence
  Optimized genes for Pichia pastoris
atgttgatccccaaggaggatcggaagaagatccaccagcatttgtttcaggagggggtggtcgtcgcgaagaaagacttcgaaatacagcacgaggaaataggaaccaagaatctatacgtgattaaggctttgcagtcccttacgtccaagggctatgttaaaacgcaattctcttggcaatactactactattcattaaccgatgacggcttagagtacttgagagagtatctcaacataccggaaggtatcgtgccaaaaaccctcctccaagaaccagtgccagaacgactcccacggcggggaggggaacgtcgatttactcgtaattag

SEQ ID NO: 4305 - DNA, 717 bp, Artificial Sequence
  Optimized genes for Pichia pastoris
atgaagttgaatatcgctttcccggctaacggtacgcagaagtgcatagagatagacgatgagcacaaattgcaagctttttacgagaaacgaatgggtcaggaggtggaaggcgacagtgtatccgatgagtttaaaggatatgtatttaagattactggtgggaacgataaacaggggttcccgatgaaacagggagttatgcacccaacgcgtgttcgcttgctactaagcaaaggtcactcttgctatcgtccacgtcgggtgggagaacgcaagcgtaaatccgttcggggatgcatagtagctgccgatctttcggtcttaagcctagtagtcgtgcgtcagggcgaacagcaaatcgaaggtctcacggatgcacaggttccgaaaaaactgggcccgaaaagggccaacaatattagaaaattctttggactaaccaaggaagatgacgtccgccaattcgtgatcaggagagaggtcgtcaaaggagacaagacatatactaaggcccctaaaattcaacgccttattaccccagagcggattcagaggaaacagcatctcagagagttaaaatacgaaaatgccaggcggcaaaaggacgcagccgctgagtatgcgaaactgctagctgaaaaaatccatcagagaaacgccgagaaagcagaaattaagaaacgccgcgcgtcatccctgcgtgcggaggcctga

SEQ ID NO: 4306 - DNA, 2493 bp, Artificial Sequence
  Optimized genes for Pichia pastoris
atggtgaacgagaagaaaccactcctcgacgcaagtgggaccgaaaatggccccgaggacttaacagctacggcgatacttcgcaagaaaaaaaaggacaacgcactaatagtggatgatgcgattagcgacgataactccgtcatcggtatgagcagcaataccatggagttattgcaattgttccgtggagacactgtcctggtcaaaggaaagaagcgaaaggacaccgtcctcattgtactggcagacgacgacattgaggatggtgcgtgtcgtgttaatcgtgtggtgcgtaacaacttacgggttcgtttgggagatatcgttaccgttcatccgtgcccggacataaagtacgcgtcgcgaatatcggtactgcctatcgccgatacaattgagggattaaccggttctctttttgatgtatatttgaagccatatttcgtagaagcctatcgtccagtgagaaaaggggatacttttacagtaagaggtggcatgcgtcaagttgagtttaaagttatggatgtagaacctgaccagtatgctattgtcgctcaagatacggttatacattcagaaggagaacccctaaatagagaagacgaagagaacaacataaacgaggtcggctacgacgacatcggaggttgccgcaagcaaatggcgcaaatacgtgagttggttgaattacctctgaggcacccgcaattgttcaaggctatcggaatcaagcctccaaagggaattctgatgtacggaccgcccggcacaggaaagactctcatggccagggcagtagctaatgaaacgggcgccttcttcttcttgataaatggacctgagatcatgagcaaaatggctggtgaaagcgaaagtaatttgagatcggcgtttgaagaggcagagaagaatgcccctagtatcatattcatcgatgaaatcgactcaatcgcccccaagcgagacaaaactaatggggaagtcgaacgaagggtggtgtcgcaacttctaacgctcatggatggaatgaaagcgcgttcgaacatagtggtaatcgccgcaacgaatagacccaactctattgatccagctctgcgcaggtttggaaggtttgatcgtgaggttgatattggcattcctgatgtgacaggaagactcgagtgcctccggatccatacaaagaacatgaagttggctgaagacattgacttagaaagcattgcgcaggaaacacacggatacgtcggtgcggacatcgcttcgttgtgtagcgaggcagcaatgcaacaaattcgagagaagatggatttgatcgatttggacgaagacactatcgatgcggaggtattggattctttaggggtcacgatggagaacttccgattcgccttaggcaattctaatccatcggcgctacgggagaccgtcgtagagagcgttaatgtgacgtgggatgacatcggcggccttgatagtatcaaaaatgagctcaaggagaccgtagagtaccctgtgttacacccggaccaattcgcaaaatttggactaagcccgtcaaaaggcgtgctatttttcggaccccccggtaccggcaagacgttacttgctaaagcggtcgcaactgaggtgtcagctaacttcatcagcgtaaagggtccggaactactatcgatgtactttggtgagtctgagtcaaatatccgggacatcttcgataaggcccgggcagctgcgcctacagtagtatttttagatgagttggattctattgcgaaggcacgcggaaactcgttgggggatgctggtggagctagtgatagggtagtaaatcagcttctcaccgaaatggatggaatgaatgcgaagaaaaacgtttttatcatcggagccactaatcgacctgaccagatcgaccccgccattttacgccctggacggttggaccagctaatatacgttccactgcctgacgagcccgcccgtttaagcatattacaggcacagctgagaaagtcacctattgaacctggactcgacctacaagaaatcgctaaaattacaaagggattttctggagctgatctctcctatatagcccaacgcgcagctaagtttgctatcaaggatagtatcgatgcgcagaagaggttattggaagaaaaagctactcataagctggaatcttctgaagatatcgaaatgacagaggcaaagcaagacggtgaggaggtcgacgatcctgttccatttatatcacatatccattttcaggaggctatgaagacggcgaagcgatccgtttcagacgcggaattgaggcggtatgaagcgtacgcacagcaattgcagtcaagtagaggccaattcacagattttaaattcaatgacttaggggaatcggcggggaacggcggctcgatcggcgccgagagttcaggtcctgcattcggcaacgtggagcctgacgatgacgacctctacagttag

SEQ ID NO: 4307 - DNA, 621 bp, Artificial Sequence
  Optimized genes for Saccharomyces cerevisiae
atggcttctactgacttctccaagatcgaaaccttgaagcaattgaacgcctccttggctgataagtcttacattgaaggtactgctgtctctcaagctgatgtcactgttttcaaggctttccaatctgcttacccagaattctctagatggttcaaccacattgcctctaaggctgacgaatttgactctttcccagctgcttccgctgcagctgctgaagaagaagaagatgatgacgttgacttgtttggttctgatgacgaggaagccgatgctgaagctgaaaagctaaaggccgaaagaattgctgcctacaacgctaagaaagctgccaagcctgctaagccagccgctaaatctattgttactttggatgttaagccatgggatgatgaaactaacttggaagaaatggttgctaacgtcaaggctattgaaatggaaggtttgacttggggtgctcaccaattcattccaattggtttcggtatcaagaagttgcaaatcaactgtgttgttgaagacgacaaggtttctttggacgatttgcaacaatctatcgaagaggatgaagatcatgttcaatccactgatatcgctgctatgcaaaagttataa

SEQ ID NO: 4308 - DNA, 1929 bp, Artificial Sequence
  Optimized genes for Saccharomyces cerevisiae
atgtccaaggctgttggtattgacttgggtactacttactcctgtgtcgctcactttgctaatgacagagttgatatcattgccaacgaccaaggtaacagaaccaccccatctttcgttgctttcaccgatactgaaagactaattggtgacgccgcaaagaaccaagccgctatgaacccttccaataccgttttcgacgctaagagattgatcggtagaaacttcaatgacccagaagttcaagctgacatgaagcacttcccattcaagttgattgatgttgacggtaagccacaaatccaagttgagttcaaaggtgaaactaagaatttcactccagaacaaatttcctccatggtcttaggtaaaatgaaagaaaccgccgaatcttacttgggtgccaaggtcaacgatgctgttgttactgtcccagcttatttcaacgattctcaaagacaagctaccaaggacgctggtaccattgcaggtttgaacgttttgcgtatcatcaacgaacctaccgctgctgccattgcttacggtttagacaagaagggtaaggaagaacacgttttgattttcgatttaggaggtggtactttcgacgtttctttgttatccatcgaagatggtatcttcgaagtcaaggctactgctggtgacactcacttgggtggtgaggatttcgataacagattggttaaccatttcattcaagaattcaagagaaagaacaaaaaggatttgagcactaaccaaagagctttgagaagattaagaactgcttgtgaaagagccaagcgtactttgtcctcttctgctcaaacttccgtcgaaatcgattccttgtttgaaggtatcgacttctacacttctattaccagagctagattcgaggaattgtgtgctgatttgttcagatctaccttggatccagttgaaaaagttttgagagatgctaaattggacaaatcccaagtcgacgaaattgttttagtcggtggttctactagaatcccaaaggttcaaaagttggtcactgactacttcaacggtaaggaaccaaaccgttccattaacccagatgaagccgttgcatatggtgcagctgtccaagctgctattttgactggtgatgaaagttccaagactcaagacttgttgctattagatgttgccccattgtctctaggtatcgagactgccggtggtgttatgactaaattaattccaagaaactccactataccaaccaagaagtccgaaattttttccacctacgctgacaatcaaccaggtgtcttgatccaagtttttgaaggtgaacgtgctaagaccaaggacaacaacttgttgggcaagttcgaattatctggtattccaccagctccaagaggtgttccacagattgaagttacctttgatgtcgactctaatggtattttaaacgtctccgctgtggaaaagggcaccggtaagtctaacaagatcactatcaccaacgacaagggtcgtttgtcaaaggaagacattgaaaagatggttgctgaagcagaaaagtttaaggaagaagatgagaaagaatcccagagaattgcttctaagaaccaattggaatctatcgcttactctttgaaaaacaccatctctgaagctggtgataagttagaacaagcagataaagacaccgtcaccaagaaagctgaagaaactatttcttggttggactccaacactaccgcttccaaggaagaatttgatgacaagttgaaggagttgcaagatattgctaacccaatcatgtctaaattgtaccaagccggtggtgctccaggcggtgctgctggtggtgcccctggtggtttcccaggtggtgctccacctgctcctgaagctgaaggtccaactgttgaagaggtcgattaa

SEQ ID NO: 4309 - DNA, 1503 bp, Artificial Sequence
  Optimized genes for Saccharomyces cerevisiae
atgtctagattggaaagattgacttctttgaacgttgttgcaggttccgatttgagaagaacctccattatcggtactattggtccaaagaccaacaatccagagaccttggttgccttaagaaaggccggtttgaacattgttagaatgaacttttcccacggttcttacgaataccacaagtctgtcattgacaacgccagaaaatctgaagaattgtatccaggtagaccattggccattgctttggacactaagggcccagaaatccgtactggtaccactactaacgatgttgattacccaatcccaccaaaccacgaaatgattttcactaccgacgataaatacgctaaggcttgtgatgacaaaatcatgtacgttgactacaagaacatcaccaaggttatctccgctggtcgtatcatctacgtcgacgacggtgttttatctttccaagtcttggaagttgtcgatgacaagactttgaaggtcaaagctttgaatgctggtaagatctgttctcacaaaggtgtcaacttacctggtactgacgtggatttaccagccttatccgaaaaggacaaggaagacttgagatttggtgttaagaacggtgttcacatggtttttgcttccttcatcagaactgccaacgacgtcttgaccattagagaagttttgggtgaacaaggtaaagatgtcaagatcattgtcaagattgaaaaccaacaaggcgttaacaacttcgatgaaattttgaaagttaccgatggtgttatggtcgctcgtggtgacttaggtattgaaattccagctccagaagtcttagctgttcaaaagaagttgattgccaagtccaacttggctggtaagcctgttatttgtgctactcaaatgttagaatccatgacctacaacccaagaccaaccagagctgaagtttccgacgttggtaacgccatcttggatggtgctgactgtgtcatgttgtccggtgaaactgctaagggtaattacccaattaacgctgttactaccatggctgaaaccgctgtcatcgctgagcaagctattgcttacttgccaaactacgatgatatgagaaactgtactccaaagccaacttccaccactgaaactgttgctgcttctgctgttgctgccgttttcgaacaaaaagccaaggctatcatcgttttgtctacctctggtaccaccccaagattagtctccaagtaccgtccaaattgtcctattattttggtcactagatgtccaagagccgctagattctctcatttgtacagaggtgtcttcccattcgtctttgaaaaagaaccagtttctgactggactgatgatgttgaagctagaatcaacttcggtatcgaaaaggcaaaggaattcggtattttgaagaagggtgatacttacgtctctattcaaggtttcaaggctggtgccggtcactctaacactttgcaagtttctactgtgtaa

SEQ ID NO: 4310 - DNA, 513 bp, Artificial Sequence
  Optimized genes for Saccharomyces cerevisiae
atgttgagaactaccagattatggactactagaatgccaactgtttccaagttattcttaagaaactcctctggtaacgctttgaacaagaacaaattgccattcttgtactcttctcaaggtccacaagctgttagatacacttcccaacacgaatggattgccgttcaccaagacaagactgctttcgtcggtattaccaagtacgctaccgacgctttaggtgatgctacttacgttgaattgccagaagttggtactgaaattgctcaaggtgaatctttgggttctattgaatccgtcaagtctgcttctgaaatttaccaaccagctgatggtaccgtcgaagaaatcaacaccaacttggaagaaaacccaggtgtcgtcaacgaagacccaatgggtgacggttggttggttaagatgaagttgggtgaaggtgttaacgttgagcaagttgaaggtttgatgtctttagaacaatacgaaaagaccttggtccacgatgattaa

SEQ ID NO: 4311 - DNA, 399 bp, Artificial Sequence
  Optimized genes for Saccharomyces cerevisiae
atgtctggcggtaagggtggtaaggccggttccgctgctaaagcttctcaatctagatctgccaaggctggtttgactttcccagttggtagagttcacagattgttgagaagaggtaactacgctcaaagaatcggttctggtgctccagtctacttgaccgctgtcttggaatacttagctgctgaaattttggagttggctggtaatgctgccagagacaacaaaaagaccagaattattccaagacacttgcaattggccatcagaaacgatgatgaattgaacaagttgttgggtaacgttaccattgctcaaggtggtgttttgccaaacattcaccaaaacttgttaccaaagaagtctgctaagactgctaaggcttcccaagaattataa

SEQ ID NO: 4312 - DNA, 570 bp, Artificial Sequence
  Optimized genes for Saccharomyces cerevisiae
atggctaacttgagaactcaaaagagattggctgcttctgtcgttggtgtcggtaagagaaaggtctggttggacccaaatgaaacttctgaaattgctcaagccaactccagaaacgccatcagaaagttggtcaagaacggtactattgttaagaaggctgttactgttcactccaagtctagaacccgtgctcacgctcaatctaagcgtgaaggtagacactctggttacggtaagagaaaaggtaccagagaagccagattgccatctcaagttgtttggattagaagattaagagttttgagaagactattggccaagtacagagatgctggtaaaattgacaagcatttgtaccacgttttatacaaggaatctaagggtaacgctttcaagcacaagagagctttggttgaacacattattcaagctaaggctgatgcccaaagagaaaaggccttgaacgaagaagctgaagctagacgtttgaaaaacagagctgcccgtgacagaagagcccaacgtgttgctgaaaaaagagacgctttgttgaaggaagatgcttaa

SEQ ID NO: 4313 - DNA, 603 bp, Artificial Sequence
  Optimized genes for Saccharomyces cerevisiae
atgggtatctctagagactctagacacaagagatctgccaccggtgctaaaagagctcaatttagaaagaagagaaagtttgaattgggtagacaaccagctaacaccaagatcggtgccaagcgtattcactctgtcagaactagaggtggtaacaagaagtacagagctttgagaatcgaaactggtaacttctcttgggcctctgaaggtatttccaagaagaccagaattgctggtgttgtttaccatccatctaacaacgaattggttagaaccaacactttgaccaaggctgctattgttcaaatcgatgctactccattcagacaatggttcgaagctcactacggtcaaactttaggtaagaagaagaacgtcaaggaagaagaaaccgttgctaagtctaagaatgctgaaagaaaatgggctgccagagccgcttctgctaagattgaatcctctgttgaatctcaattctccgccggtcgtttgtacgcttgtatctcctccagaccaggtcaatctggtagatgtgatggttacattttggaaggtgaagagttggctttctacttgagaagattgactgctaagaaataa

SEQ ID NO: 4314 - DNA, 414 bp, Artificial Sequence
  Optimized genes for Saccharomyces cerevisiae
atgtctggtaacggtgctcaaggtaccaagttcagaatttctttgggtttgccagtcggtgccatcatgaactgtgctgacaactccggtgctagaaacttgtacattattgctgtcaagggcagtggttccagattgaacagattaccagctgcttccttaggtgacatggtcatggctactgttaagaaaggtaagccagaattgagaaagaaggttatgccagccattgttgtcagacaagctaagtcttggagaagaagagatggtgttttcttgtactttgaagataacgctggtgttattgccaacccaaagggtgaaatgaagggttctgctattactggtccagttggtaaggaatgtgccgatttatggccaagagttgcttctaactctggtgtcgttgtttaa

SEQ ID NO: 4315 - DNA, 393 bp, Artificial Sequence
  Optimized genes for Saccharomyces cerevisiae
atggcttctttgccacatccaaaaattgttaagaagcacaccaagaagttcaagagacaccactctgacagataccacagagttgccgaaaactggagaaagcaaaagggtattgactctgttgttagaagaagattcagaggtaacatctctcaaccaaagattggttacggttctaacaagaaaaccaaattcttgtctccatctggtcacaagacctttttggttgctaacgtcaaggacttggaaactttgaccatgcacactaagacttacgctgctgaaattgctcacaacatttctgccaagaacagagtcgttattttggctagagctaaggctttgggtatcaaggttaccaacccaaagggtagattggccttagaagcttaa

SEQ ID NO: 4316 - DNA, 411 bp, Artificial Sequence
  Optimized genes for Saccharomyces cerevisiae
atggctagaaccaagcaaactgctcgtaaatctaccggtggtaaggctccaagaaagcaattggcttccaaggctgctagaaagtctgccccatctactggtggtgttaagaagcctcacagatacaagccaggtactgttgctttacgtgaaatcagaagatttcaaaaatccactgaattgttgattagaaaattgccattccaaagattggtcagagaaattgctcaagatttcaagactgatttgagattccaatcttctgctattggtgctttgcaagaatctgttgaagcttacttggtttctttgtttgaagacaccaacttggctgccattcacgctaagagagttaccattcaaaagaaggacatcaagttggccagacgtttgagaggtgaaagatcttag

SEQ ID NO: 4317 - DNA, 864 bp, Artificial Sequence
  Optimized genes for Saccharomyces cerevisiae
atgacctacactaccagacaaattggtgccaagaacactttggaatacaaggtctacatcgaaaaggatggtaagccagtctctgctttccacgatattcctttgtacgctgacaaagaaaacaacattttcaacatggttgttgaaatcccaagatggactaatgctaaattagaaattaccaaggaagaaaccttgaacccaattattcaagacactaagaaaggtaagttgagattcgttagaaactgtttccctcaccacggttacattcacaactacggtgctttcccacaaacctgggaagatccaaacgtttctcatccagaaaccaaagctgttggtgacaacgatcctatcgatgttttggaaatcggtgagaccattgcttacaccggtcaagtcaagcaagttaaggccttgggtatcatggctttgttagatgaaggtgaaactgactggaaggttattgccattgacatcaacgacccattggctccaaaattgaatgacattgaagacgtcgaaaaatacttcccaggtttgttgagagctactaacgaatggttcagaatctacaagattccagacggtaagccagaaaaccaatttgctttctccggtgaagctaagaacaagaagtacgccttggatatcatcaaggaaactcacgactcttggaaacaattgattgctggtaaatcttctgactccaagggtattgacttgaccaacgtcactttgccagatactccaacttactctaaggctgcttccgacgctattccaccagcttctccaaaggctgatgctccaatcgacaagtctattgataaatggttcttcatctctggttctgtgtaa

SEQ ID NO: 4318 - DNA, 936 bp, Artificial Sequence
  Optimized genes for Saccharomyces cerevisiae
atgctttccagaattgtttctaacaatgctaccagatctgtcatgtgtcaccaagctcaagttggtatcttgtacaagaccaacccagtcagaacttatgctactttgaaggaagttgaaatgagattgaaatccatcaagaacattgaaaaaattactaagactatgaagatcgttgcctctactagattatccaaggctgaaaaggccaagatttctgccaagaagatggacgaagctgaacaattattctacaaaaatgccgaaaccaagaacttggatgtcgaagccactgaaactggtgccccaaaagaattaattgttgctattacctctgacaagggtttgtgtggttctattcactctcaattggctaaggctgttagaagacacttgaacgaccaaccaaatgctgatattgtcactatcggtgacaaaatcaaaatgcaattgttgagaactcacccaaacaacatcaagttatctatcaacggtattggtaaggatgctccaactttccaagaatctgctttgattgctgacaagttgttgtctgttatgaaagccggtacttacccaaagatctctattttctataacgatccagtttcctccttgtcctttgaaccatctgaaaagccaatcttcaacgctaaaaccatcgaacaatctccatctttcggtaagttcgaaattgacactgacgctaacgttccaagagatttgtttgaatacactttagccaaccaaatgttgactgctatggctcaaggttacgctgctgaaatctccgctagaagaaacgccatggataacgcttctaagaatgctggtgatatgattaacagatactccattttgtacaacagaaccagacaagccgttatcactaacgaattggttgatatcatcaccggtgcttcttctttgggttag

SEQ ID NO: 4319 - DNA, 471 bp, Artificial Sequence
  Optimized genes for Saccharomyces cerevisiae
atgtctactgaattgactgtccaatctgaaagagccttccaaaagcaaccacacattttcaacaacccaaaggtcaagacttctaagagaactaagagatggtacaagaatgctggtttgggtttcaagactccaaaaactgctattgaaggttcttacattgacaagaagtgtccattcactggtttagtctctattagaggtaagatcttgaccggtactgttgtctccaccaagatgcacagaaccattgttatcagaagagcttacttgcactacatcccaaagtacaacagatacgaaaagagacacaagaacgttccagttcacgtttctccagctttcagagttcaagttggtgacattgtcaccgtcggtcaatgtagaccaatttccaagaccgttagattcaatgttgttaaggtttccgctgctgccggtaaggctaacaagcaatttgctaagttctaa

SEQ ID NO: 4320 - DNA, 633 bp, Artificial Sequence
  Optimized genes for Saccharomyces cerevisiae
atgtctgtctccaagattgctttcgtcttgtccgctattgcatctttggctgttgctgacacttctgctgccgaaaccgctgaattgcaagctatcattggtgacatcaactctcatttgtctgactacttgggtttggaaactggtaactccggtttccaaattccatctgatgttttgagtgtctaccaacaagttatgacttacactgatgatgcttacactactttgttctctgagttggatttcgatgccattaccaagaccattgtcaagttgccatggtacaccaccagattgagctctgaaattgccgctgccttggcctccgtctctccagcttcttccgaagccgcctcttcttctgaagctgcttcctcctccaaagctgcttcatcttcagaagctacttcctctgccgctccatcctcttctgctgctccatcttcctctgctgctccttccagcagtgctgaatcttcttctaaggctgtcagcagttctgttgccccaaccacttcatccgtttctacctctactgttgaaactgcttccaacgccggtcaaagagttaacgctggtgctgcttctttcggtgccgttgtcgctggtgctgcagctttgttgttataa

SEQ ID NO: 4321 - DNA, 1290 bp, Artificial Sequence
  Optimized genes for Saccharomyces cerevisiae
atgcaattcaagaatgctttgactgccaccgctatcttgtctgcttctgccttggctgccaacagtaccacctctattccatcttcatgttccattggtactagtgcgactgctactgctcaagctgatttggacaagatttccggttgttctactattgttggtaacttgacaattactggtgacttgggttccgccgctttagcttccatccaagaaattgatggttcattgaccattttcaactctagctccttgtcctctttctccgctgacagcatcaagaagatcaccggtgatttgaatatgcaggaattgatcatcttaacttccgcatcttttggttctctacaagaagtcgattctatcaacatggttaccttaccagctatttctactttctctactgacttgcaaaacgcaaacaatattattgtctccgacactaccttagaatctgttgaaggtttctccactttgaaaaaagtcaacgttttcaacattaacaacaacagatacttgaactccttccaaagttctttggaaagtgtttctgactctttgcaattttcttccaatggtgacaacaccactttagccttcgacaatttggtctgggctaacaacatcactttgagagatgttaattctatctctttcggttctcttcaaaccgttaacgcttccttaggttttatcaataacactttgccatccttgaacttgactcaattatcaaaggtcggtcaatctttatccatcgtttccaacgatgaattaagcaaggctgctttcagtaacttaactactgttggtggtggtttcatcattgctaataatacccaattgaaggttattgacggttttaacaaggttcaaactgtcggtggcgcaattgaagttactggtaacttcagcaccttggatttatcttctttgaagtccgttagaggtggtgctaactttgactccagctcttctaacttctcttgtaacgctctaaagaagttacaatccaacggtgccattcaaggtgattcctttgtttgtaagaacggtgctacttctacctctgtcaagttgtcatccaccagcactgaatcctccaagtctagtgctacctcctctgctagctcatctggtgatgcttcaaacgcccaagccaacgtctctgcctctgcttcttcttcttcttcctcttccaagaaatctaagggtgctgctccagaattggttccagccacttctttcatgggtgttgttgctgctgttggtgtcgctttgttgtaa

SEQ ID NO: 4322 - DNA, 447 bp, Artificial Sequence
  Optimized genes for Saccharomyces cerevisiae
atgtcttcctctaagagaattgccaaggaattgtctgacttggaaagagacccacctacttcttgttccgctggcccagttggtgacgatttgtaccactggcaagcttctatcatgggtccagctgactctccatacgctggtggtgttttcttcttgtctattcacttcccaactgactacccattcaagccaccaaagatttctttcactaccaagatctaccatccaaacatcaacgctaacggtaacatttgtttggacattttgaaggaccaatggtctcctgctttgactttgtccaaggttttgttatccatctgttctttgttgaccgatgccaacccagatgatccattggttccagaaattgctcacatttacaagaccgacagaccaaaatacgaagctactgctagagaatggactaagaagtacgccgtgtaa

SEQ ID NO: 4323 - DNA, 567 bp, Artificial Sequence
  Optimized genes for Saccharomyces cerevisiae
atgaaccctcaagtttctaacatcatcattatgttggttatgatgcaattgtccagaagaatcgacatggaagacccaaccattatcatgtacatcagaattttgtactgttcttctattggtatttcttggattatttaccaaatggctagaaagcgtattgttgctaagaacgatatgactaccatgaagtacgttgaaccaggtaatgctatgtctggtgaaggtgaaaagttgcaagtcaccactgttagagactacgatttgaaggaaattgactctgccatcaagtctatctacactggtatggccatgatgggtttcatgcacttgtacttgaaatacaccaacccattgtttatgcaatccatctctccagttaaatctgctttggaacacaacgaagtcaagatccatttgttcggtaagccagctactggtgacttgaagagaccattcaaggctccatctttgtttggtggtatgggtcaaaccggtccaaagactgacaagaagtccattgaagaagctgaaagagctggtaacgccggtgttaaggccgaataa

SEQ ID NO: 4324 - DNA, 483 bp, Artificial Sequence
  Optimized genes for Saccharomyces cerevisiae
atgggtaaatctcacggttacagatctagaaccagatacatgttccaaagagatttcagaaagcatggtgctgtccacttgtccacttacttgaaggtctacaaggttggtgacattgtcgatattaaggccaacggttctattcaaaagggtatgccacacaagttctaccaaggtaagactggtgttgtttacaacgttaccaagtcttctgtcggtgtcatcatcaacaagatggttggtaacagatatttagaaaagagattgaacttgagagttgaacacatcaagcactccaagtgtcgtcaagaattcttggaaagagtcaaggctaacgctgctaagagagctgaagctaaagcccaaggtgttgctgttcaattgaaaagacaaccagctcaaccaagagaatccagaattgtttctactgaaggtaacgtcccacaaactttggctccagttccatacgaaactttcatttaa

SEQ ID NO: 4325 - DNA, 1665 bp, Artificial Sequence
  Optimized genes for Saccharomyces cerevisiae
atgtctaacaactccttcaccaacttcaagttggctactgaattgccagcttggtccaaattgcaaaaaatttatgaatctcaaggtaagactttgtctgtcaagcaagaattccaaaaggacgctaagagatttgaaaagttgaacaagaccttcacaaactacgatggttccaagatcttattcgattattctaagaatttagttaacgatgaaattattgctgctttgattgaattagctaaagaagctaacgttacaggtttgagagatgctatgtttaagggtgaacacatcaattctactgaagatagagctgtctaccacgttgctttaagaaacagagccaataagccaatgtacgttgatggtgttaatgttgccccagaagtcgactctgtgttgaagcacatgaaggaattttctgaacaagtcagatccggtgaatggaagggctacactggtaagaagatcactgatgtcgtcaacatcggtattggtggtagtgatttgggtccagttatggttaccgaagccttgaaacattacgctggtgtcttggatgttcacttcgtttctaatattgacggtactcatattgcagaaactttaaaggtcgttgacccagaaaccactttgtttttgatcgcctccaagacattcactactgctgaaaccattactaatgccaacactgccaagaactggttcttatcaaagactggtaatgatccatcccacattgctaagcatttcgctgccttatctaccaacgaaacagaagttgcaaagttcggtatcgacaccaagaacatgttcggtttcgagtcttgggttggtggtagatactctgtttggtctgctattggtctatccgttgctttgtacatcggttacgacaacttcgaagctttcttgaagggtgccgaagctgttgacaaccactttactcaaactccattggaagacaatatcccattattgggcggtttgttgtccgtctggtacaacaatttctttggtgctcaaacccacttggtcgctccattcgaccaatacttgcacagattcccagcttacttacaacaattatccatggaatccaatggtaagtctgtcaccagaggtaacgtcttcactgactactccaccggttctattttgttcggtgaaccagccactaacgctcaacactctttcttccaattggtccaccaaggtaccaaattaattccatctgatttcatcctggccgctcaatctcacaacccaatcgaaaacaagttacatcaaaagatgttggcttccaactttttcgcccaagctgaagcattgatggtcggtaaagacgaagaacaagttaaggctgaaggtgccaccggtggtttggttccacacaaggttttctctggtaacagaccaactacctctatcttggcacaaaagattaccccagctaccttgggtgctttgattgcctactacgaacatgttactttcactgaaggtgctatctggaacattaactcttttgatcaatggggtgttgaattgggtaaagttttggccaaggttattggtaaggagttagataacagtagtaccatctccactcacgatgcttctaccaacggtttaatcaaccaattcaaggaatggatgtga

SEQ ID NO: 4326 - DNA, 1614 bp, Artificial Sequence
  Optimized genes for Saccharomyces cerevisiae
atgcacttctctttgaaacaattggctgttgctgctttctacgctaccaacttgggctccgcttatgtcatccctcaattcttccaagaagccttccaacaagaggaaccaattgaaaactacttgccacaattaaacgatgacgactcctctgctgtcgccgctaacattccaaagccacacattccttacttcatgaagcctcacgttgaatctgaaaaattacaagacaagattaaggttgatgatttgaacgctactgcttgggatttatacagattggccaattactctactccagattacggtcatccaactagagttattggttctaagggtcacaacaagactatggaatatatcttgaacgttttcgatgacatgcaagattactacgatgtttctttgcaagaatttgaagctttgtctggtaaaattatttccttcaacttgtccgatgccgaaactggtaagtcttttgccaacactaccgcttttgctttgtctccacctgtcgatggtttcgttggtaaattggtcgaaatcccaaacttgggttgtgaagagaaggactacgcctccgttgtcccaccaagacacaacgaaaagcaaatcgctttaatcgaaagaggtaagtgtccatttggtgacaaatccaacctagccggtaagttcggtttcactgccgttgttatctacgacaacgagccaaaatctaaagaaggtttgcacggtactctaggtgaaccaaccaagcacactgttgccactgtcggtgttccatacaaggtcggtaagaagttgattgccaacatcgccttgaacattgactactccttgtactttgctatggattcttacgttgaattcatcaagacccaaaacatcattgctgacactaagcatggtgatccagacaatattgttgcattaggtgcccactctgactcagtggaagaaggtccaggtatcaacgacgatggttccggtaccatttctttgttgaacgtcgctaagcaattgactcatttcaagatcaacaacaaagttagattcgcttggtgggctgctgaagaagaaggtttattgggttctaacttctatgcttacaacttaacaaaggaagaaaactccaagatcagagtctttatggactacgatatgatggcttccccaaattatgaatacgaaatttatgatgctaacaacaaggagaacccaaagggctccgaagaattgaagaacctttacgtcgactattataaggctcaccacttgaactacactttggttccattcgacggtagatctgattatgttggttttattaacaacggtattccagctggtggtattgccaccggtgctgaaaagaataatgttaacaatggtaaggttttggacagatgttaccaccaattgtgtgatgatgtctccaatttatcttgggacgctttcattactaacaccaagttgattgctcattctgttgctacttacgctgactctttcgaaggattcccaaagagagaaactcaaaagcacaaggaagttgacattttgaatgctcaacaaccacaatttaagtacagagctgatttcttgatcatctaa

SEQ ID NO: 4327 - DNA, 1095 bp, Artificial Sequence
  Optimized genes for Saccharomyces cerevisiae
atgtctgctccaaaaaagattgttgttttgcctggtgaccacgttggtcaagaaattaccgctgaagctatcaaggttttaaaggctatttctgatgttagatctaacgttaagttcgatttcgaaaaccatttgattggtggtgctgccattgacgctactggtgttccattgcctgatgaagctttggaagcctccaagaaggctgatgctgttttgttaggtgccgttggcggtccaaagtggggtaccggttccgttagaccagaacaaggtttgttgaagatcagaaaagaattacaattgtacgctaacttgagaccttgtaacttcgcttctgactccttattagatttatctccaatcaagccacaatttgctaagggtactgacttcgtcgttgtcagagaattggtcggtggtatttacttcggtaagagaaaggaagatgatggtgacggtgttgcttgggactctgaacaatacactgtcccagaggtccaaagaatcaccagaatggctgctttcatggccttgcaacacgaacctccattacctatctggtctttggacaaagccaacgtcttagcttcttctagattatggagaaagactgttgaagaaactatcaaaaacgaattcccaactttgaaagttcaacatcaattaattgattctgccgccatgattttggttaagaatccaacccacttgaacggtatcatcattacttccaacatgttcggtgatattatttccgacgaagcatctgttattccaggttctctaggtctattgccatctgcttccttggcctctttaccagacaagaacactgcttttggtttatacgaaccatgtcacggttctgccccagatttgccaaagaacaaggttaacccaattgctaccattttgtccgctgctatgatgttgaagttgtctttgaatttgccagaagaaggtaaagctattgaagacgctgtcaagaaggtcttggatgctggtattagaactggtgacttgggtggttcaaactctaccactgaagttggtgatgccgtcgctgaagaagtcaagaaaatcttggcttaa

SEQ ID NO: 4328 - DNA, 2400 bp, Artificial Sequence
  Optimized genes for Saccharomyces cerevisiae
atggtcttgccaattctaccattgattgatgatttggcttcttggaactccaagaaggaatatgtctctttggttggccaagttctattagatggttcctctttgagtaacgaagaaattttacagttttccaaggaagaagaagttccattagttgcattgtccttgccatctggtaaattctcagatgacgaaattattgctttcttgaacaacggtgtctcctctctattcattgcttcccaagacgccaagaccgctgagcatttagttgaacaattgaacgttccaaaagaacgtgtcgttgtcgaagaaaatggtgtcttctccaaccaattcatggttaaacaaaaattctctcaagataagatcgtttctatcaagaagctatccaaagatatgttaaccaaggaagtcttaggtgaagtcagaactgacagaccagatggcttgtacaccactttggttgttgaccaatacgaaagatgtttgggtttggtttattcttctaagaaatccattgccaaggctatcgatttaggcagaggtgtttactactcaagatctagaaatgaaatctggattaagggcgaaacttccggtaacggtcaaaagttactacaaatctccaccgactgtgacagtgatgctttgaaatttattgtggaacaagaaaatgttggtttctgtcacttggaaaccatgtcctgtttcggtgaattcaagcatggtttggtcggtttggaatcccttttgaagcaaagattgcaagatgccccagaagagtcttacactagaagattattcaacgactctgccttgttggacgctaaaatcaaggaggaagctgaagaattgactgaagcaaagggtaagaaggaattatcctgggaagccgctgacttgttctacttcgctttagctaaattggttgctaatgatgtttcattgaaggacgttgaaaacaatttaaacatgaagcacttaaaagttaccagaagaaagggtgatgctaagccaaagttcgttggtcaaccaaaagctgaagaagaaaagttgaccggtccaattcacttggatgtcgtcaaggcctctgacaaggtcggcgtccaaaaggctttgagcagacctattcaaaagacttctgaaatcatgcacttggtcaacccaatcattgaaaacgtcagagacaaaggtaactctgctttgttagaatacaccgaaaagtttgacggtgttaagttgtccaatccagttttgaatgctccattcccagaagaatactttgaaggtttgacagaggaaatgaaagaagctttggacttgtccatcgagaatgtccgtaagttccacgctgctcaattgccaactgaaaccttggaagttgagactcaacctggtgttttgtgttccagattcccacgtccaatcgaaaaagtcggtttatacatcccaggtggtaccgctattttgccttccactgccttgatgttgggtgtcccagcacaagtcgctcaatgtaaggaaattgtctttgcttctccaccaagaaagtctgatggtaaggtttccccagaggtggtctacgttgccgaaaaggtcggtgcttctaaaattgtcttggccggtggtgctcaagccgttgctgctatggcttacggtactgaaactattccaaaggttgacaagattttgggcccaggtaatcaatttgttactgctgccaagatgtacgttcaaaatgacacccaagctctatgttctattgacatgccagctggtccatccgaagttctggttatcgctgatgaagatgctgacgtcgattttgtcgcctccgatttgttgtctcaagctgaacacggtattgactcccaagttattcttgttggtgttaacttgtcagaaaaaaagattcaagagatccaagacgctgttcacaaccaagcattacaattaccaagagttgatattgttagaaagtgtatcgctcactctaccattgttttatgtgatggttatgaagaagctctagaaatgtctaaccaatatgctccagaacatttgatcttgcaaattgctaacgcaaacgattacgtcaaattagtcgacaacgctggttctgttttcgtcggtgcatacactcctgaatcttgtggtgactactcctccggcaccaaccacactttacctacttatggttacgctagacaatactctggtgccaacactgctactttccaaaagttcatcaccgcccaaaacatcactccagaaggtcttgaaaacattggtagagctgtcatgtgtgttgctaagaaggaaggtttagacggtcacagaaacgccgtcaagatcagaatgtctaagttgggtctaattccaaaggatttccaataa

SEQ ID NO: 4329 - DNA, 333 bp, Artificial Sequence
  Optimized genes for Saccharomyces cerevisiae
atggtttctcaagaaaccatcaagcatgttaaggacttgattgctgaaaacgaaattttcgttgcttccaagacttactgtccatactgtcacgctgctttgaacactttgtttgaaaagttgaaggtcccaagatctaaggttttggttttacaattgaatgacatgaaggaaggtgctgacattcaagctgccttgtacgaaatcaatggtcaaagaactgttccaaacatctacatcaacggtaagcacattggtggtaacgatgatttgcaagagttgagagaaactggtgaattagaagaattgttggaaccaattttggctaactaa

SEQ ID NO: 4330 - DNA, 1503 bp, Artificial Sequence
  Optimized genes for Saccharomyces cerevisiae
atgtctttcgatgatttgcacaaggctactgaaagagctgttattcaagctgtcgaccaaatttgtgacgatttcgaagtcaccccagaaaagttggatgaattaactgcttacttcatcgaacaaatggaaaaaggtttggctccaccaaaggaaggtcacaccttggcttctgataagggtctacctatgatcccagctttcgttactggttcaccaaacggtacagagagaggtgttttgttggctgctgacttgggtggtaccaacttcagaatctgttctgttaacttgcatggtgaccacactttctccatggaacaaatgaagtctaagattccagatgacttgttagatgacgaaaacgtcacttctgacgatttgttcggtttcttggccagaagaactttagccttcatgaagaagtaccatccagacgagttggcaaagggtaaagatgctaagccaatgaaattagggttcaccttctcttacccagttgatcaaacctctttgaactctggtactttgatcagatggaccaagggttttagaattgctgataccgttggtaaggatgtcgttcaattgtaccaagagcaactatccgctcaaggtatgccaatgatcaaggtcgtcgctttgactaacgacactgttggtacttacttgtctcattgttacacttccgacaacactgactctatgactagtggtgaaatctctgaaccagtcattggttgtatctttggtaccggtactaatggttgctacatggaagaaatcaacaaaattactaagttgccacaagaattgagagacaagttaatcaaagaaggtaagactcacatgattattaacgttgaatggggttcttttgataacgaattgaagcatttgcctactaccaaatacgatgttgttatcgaccaaaagctatctaccaacccaggtttccatttatttgaaaagagagtttccggtatgttcttaggtgaggtcttaagaaacattttggttgacttacactctcaaggtttattgttgcaacaatacagatccaaggaacaattaccaagacacttgaccactccattccaattgtcctccgaagttttatctcacattgaaattgacgactccactggtttgagagaaactgagttatccttgctacaatctctaagattgccaaccaccccaactgaaagagtccaaatccaaaaattggtcagagccatttccagaagatctgcttatttggctgccgttccattagctgctatcttgattaagaccaatgctttaaacaagagataccacggtgaagttgaaattggctgtgatggttccgttgtcgaatactaccctggtttcagatcaatgttgagacatgctttggccttgtctccattgggtgctgaaggtgaaagaaaggttcacttaaagatcgccaaggacggttctggtgtcggtgccgctttgtgtgctttagttgcttaa

SEQ ID NO: 4331 - DNA, 1569 bp, Artificial Sequence
  Optimized genes for Saccharomyces cerevisiae
atgaagttttctgccggtgctgtgttgtcttggtcttctttgttgctagcttcctccgttttcgctcaacaagaggctgttgctccagaagactccgccgttgtcaaattggctactgattctttcaatgaatacattcaatctcatgatttagttttagctgaattcttcgcaccatggtgcggtcattgtaagaatatggccccagaatatgtcaaggctgccgaaactttggtcgaaaagaacatcaccttggcacaaatcgactgtaccgaaaaccaagatttgtgtatggaacacaacattccaggtttcccatctttgaaaattttcaagaactctgacgtcaacaactccattgactacgaaggtccaagaactgctgaagccatcgttcaatttatgattaagcaatcccaaccagccgtcgctgtcgttgccgacttgccagcttacttagccaacgaaaccttcgttactccagtcatcgtccaatctggtaagatcgatgctgatttcaacgccactttctactccatggctaacaagcacttcaacgattacgattttgtctctgctgaaaacgctgatgacgatttcaaattatccatctacttgccatccgctatggacgaaccagttgtttacaacggtaagaaggccgatattgctgacgcagacgtttttgaaaaatggttgcaagttgaagcactaccatactttggtgaaattgacggttctgtctttgcccaatacgttgaaagtggtttgcctttgggttacttgttttacaatgacgaagaagagttggaagaatacaagccattgttcactgaattggctaagaagaacagaggtttgatgaactttgtttctattgatgctagaaagttcggtagacacgctggtaacttgaacatgaaagaacaattcccattatttgctattcatgacatgactgaagatttgaagtacggtttaccacaattatctgaagaagctttcgatgaattgtccgacaagattgtcttagaatccaaggctatcgaatctttagtcaaggacttcttgaagggtgacgcttctccaattgttaagtctcaagaaatcttcgaaaaccaagactcttccgtcttccaattggttggtaaaaaccacgatgaaattgttaacgacccaaagaaggatgtcttggttttgtactacgctccatggtgtggtcactgcaagagattggctccaacttatcaagaattggctgacacttacgccaatgctacctctgatgttttgattgccaagttggaccacactgagaatgatgtcagaggtgttgttattgaaggttatccaaccattgtcttatacccaggtggtaagaaatccgaatctgttgtctaccaaggttccagatctttggattccttattcgacttcatcaaggaaaatggtcactttgatgttgatggtaaagctttgtatgaagaagctcaagaaaaggctgctgaggaagctgacgctgatgctgaattagcagatgaagaagatgccattcacgacgagttataa

SEQ ID NO: 4332 - DNA, 1251 bp, Artificial Sequence
  Optimized genes for Saccharomyces cerevisiae
atgtctttatcctccaagttgtctgtccaagatttagacttgaaggataagagagttttcattagagtcgatttcaacgtcccattggacggtaagaagattacttctaaccaaagaattgttgctgctttgccaactatcaagtacgtcttagaacaccatccaagatacgttgttttggcctctcatttgggtagaccaaacggtgaaagaaacgaaaaatactctttggctccagttgctaaggaattgcaatctctattaggtaaggacgtcacttttttgaacgactgtgttggtcctgaagttgaagctgctgttaaagcttccgctcctggttctgttatcttgttggaaaatttgagataccacattgaagaagaaggttccagaaaggttgatggtcaaaaagttaaggcatctaaggaagatgttcaaaagttcagacacgaattgtcctctttagctgatgtctacatcaacgatgcttttggtactgcccacagagctcactcttccatggttggattcgatttgccacaaagagccgctggtttcttgttggaaaaggaattgaaatacttcggtaaggctttggaaaacccaaccagaccattcttggctattttgggtggtgccaaggtcgctgacaagatccaattgattgacaacttgctagacaaagtcgactctattatcatcggtggcggtatggctttcactttcaagaaggttttagaaaacactgaaattggtgattctatcttcgacaaggccggtgctgaaatcgttccaaagttgatggaaaaagccaaggctaagggtgtcgaagtcgtcttgcctgttgacttcatcattgctgacgctttctctgccgatgccaacactaagactgttactgacaaggagggtattccagctggttggcaaggtttggacaatggtccagaatctagaaaattgtttgccgctaccgtcgcaaaggctaagaccattgtctggaacggtccaccaggtgtcttcgaatttgaaaagtttgctgccggtaccaaggctttattggatgaagttgtcaagtcttctgctgctggtaacaccgttattattggtggtggtgacactgctactgtcgccaagaagtacggtgttaccgataaaatttctcacgtttctactggtggtggtgcttctttggaactactagaaggtaaagaattaccaggtgttgccttcttatctgaaaagaaataa

SEQ ID NO: 4333 - DNA, 1086 bp, Artificial Sequence
  Optimized genes for Saccharomyces cerevisiae
atgaagggtttgattttagttggtggttacggtaccagattgagaccattgactttgaccgttccaaagccattggttgaattcggtaacagaccaatgatcttgcaccaaatcgaagctttggctaatgctggtgtcaccgatattgttttagctgtcaactacagacctgaagttatggttgaaacattgaagaaatacgaaaaagaatatggtgttaacattactttctctgtcgaaactgaacctttaggtactgccggtcctttgaagttggctgaagatgtcttgaaaaaagataactctccatttttcgtcttaaactccgacgtcatctgtgaatacccattcaaggaattggctgatttccacaaggctcacggtggtaaaggtactattgttgctaccaaggtcgacgaaccatctaagtacggtgttatcgttcacgacattgctactccaaacttgatcgacagattcgttgagaagccaaaggaatttgttggtaatagaattaacgctggtttatacattttgaacccagaagtcattgacttgattgaaatgaaaccaacctctattgaaaaggaaaccttcccaattttggtggaagaaaagcaattgtactctttcgatttggaaggtttctggatggacgttggccaaccaaaggacttcttgtctggtactgtcctatacttgaactccttggccaagagacaacctaagaagttagccactggtgctaacatcgtcggtaacgccttaattgatccaactgctaagatttcttctaccgctaaaattggtccagatgttgttattggtccaaatgttactatcggtgacggtgttagaatcactagatctgttgtcttgtgtaacagtaccatcaagaaccactctttggtcaagtctaccattgtcggttggaactctactgttggtcaatggtgtagattagaaggtgtcactgttttgggtgatgatgttgaagttaaggatgaaatttacatcaacggtggtaaggttttgccacataaatctatctctgacaacgtcccaaaagaggctatcatcatgtaa

SEQ ID NO: 4334 - DNA, 171 bp, Artificial Sequence
  Optimized genes for Saccharomyces cerevisiae
atggctcacgaaaacgtctggttctctcatccaagaagattcggtaagggttctagacaatgtagagtttgttcttctcacactggtttggttagaaagtacgatttgaacatctgtcgtcaatgtttcagagaaaaggctaacgatattggtttccacaagtatcgttaa

SEQ ID NO: 4335 - DNA, 180 bp, Artificial Sequence
  Optimized genes for Saccharomyces cerevisiae
atgactattgctccaattactggtactatcaagagaagagttatcatggatattgttttggggttctctttgggtggtgttatggcttcttactggtggtggggtttccacatggacaagatcaacaagagagaaaagttctacgctgaattggctgaaagaaagaagcaagaaaactaa

SEQ ID NO: 4336 - DNA, 342 bp, Artificial Sequence
  Optimized genes for Saccharomyces cerevisiae
atggctggtttgaaggatgttgttaccagagaatacactatcaacttgcacaagagactacacggtgtttctttcaagaaaagagccccaagagctgtcaaggaaatcaagaagttcgccaagttgcacatgggtactgatgatgtcagattggctccagaattgaaccaagctatctggaagagaggtgttaagggtgtcgagtacagattgagattaagaatttccagaaagagaaacgaagaagaagacgctaagaacccattgttctcttacgttgaaccagttttggttgcttctgctaaaggtttgcaaactgttgttgtcgaagaagatgcttaa

SEQ ID NO: 4337 - DNA, 321 bp, Artificial Sequence
  Optimized genes for Saccharomyces cerevisiae
atgtctactgaatctgccttgtcttacgctgctttgattttggctgactctgaaattgaaatctcttccgaaaagttgttgactttgaccaacgctgctaacgttccagttgaaaacatctgggctgatattttcgctaaggctttggatggtcaaaacttgaaggacttgttggttaacttctctgctggtgctgccgctccagctggtgtcgctggtggtgttgctggtggtgaagccggtgaagctgaagctgaaaaagaagaagaagaggccaaggaagaatccgatgatgacatgggtttcggtttgttcgattaa

SEQ ID NO: 4338 - DNA, 600 bp, Artificial Sequence
  Optimized genes for Saccharomyces cerevisiae
atggctatttctaagaacttgccaatcttgaaaaaccacttccgtaagcactggcaagaaagagttaaagttcatttcgaccaagctggtaaaaaggtttccagaagaaatgctcgtgccaccagagctgctaagattgctccaagaccattggatttgttgagaccagttgttagagccccaactgtcaagtacaacagaaaggtcagagctggtagaggtttcactttggctgaagttaaggctgccggtttgactgctgcttacgctagaaccattggtattgccgttgaccacagaagacaaaacagaaaccaagaaattttcgatgctaacgttcaaagattgaaggaataccaatccaagatcattgttttcccaagaaacggtaaggctccagaagctgaacaagttttgtctgccgccgctactttcccaattgctcaaccagctaccgatgttgaagctagagctgtccaagataatggtgaatctgctttcagaactttaagattagccagatctgaaaagaagttcagaggtatcagagaaaagagagcccgtgaaaaagctgaagcagaagccgaaaagaagaaataa

SEQ ID NO: 4339 - DNA, 477 bp, Artificial Sequence
  Optimized genes for Saccharomyces cerevisiae
atggaaccattgatttctgctccatacttgactaccaccaagatgtctgccccagccactttggatgctgcttgtatcttctgtaagatcatcaagtctgaaattccatctttcaagttaattgaaaccaaatactcttacgctttcttagatattcaaccaactgctgaaggtcacgctttgatcattccaaagtaccacggtgctaagttgcacgatatcccagatgaattcttgaccgatgccatgccaattgccaagagattggccaaggctatgaagttggacacttacaacgttttgcaaaacaacggtaagattgctcaccaagaagttgaccacgttcacttccacttgatcccaaagagagacgaaaagtctggtttgattgttggttggccagctcaagaaactgatttcgacaagttgggtaaattacacaaggaattgttggctaaattggaaggttctgattaa

SEQ ID NO: 4340 - DNA, 321 bp, Artificial Sequence
  Optimized genes for Saccharomyces cerevisiae
atgtctgactctattatttctttcgctgctttcatcttggctgacgctggtttggaaatcacttccgacaacttgttgaccattaccaaggccgccggtgctaacgttgacaatgtctgggctgatgtttacgctaaggctttggaaggtaaggacttgaaggaaattttgtccggtttccacaacgctggtccagttgctggtgctggcgctgcttctggtgccgctgctgccggtggtgatgctgcagctgaagaggaaaaggaagaagaagctgctgaagaatctgatgatgacatgggtttcggtttattcgattaa

SEQ ID NO: 4341 - DNA, 261 bp, Artificial Sequence
  Optimized genes for Saccharomyces cerevisiae
atgttgaacagatgtatctccagaaacaccagattgccagttaacttgagaattgcttctagattctactctgatggtccattgggtggtgctggtccaggtaacccacaagatattttcatcaagagagaaagagctaaggaagactactacgctagacaacaagaacgtgaacaattggctcacgttaaggagcaattgaaggaacacaagaagaagttggaaaatttagaaaacaagatcaacaacttgtctaaataa

SEQ ID NO: 4342 - DNA, 546 bp, Artificial Sequence
  Optimized genes for Saccharomyces cerevisiae
atgggtctatacgcttccaagttgttctctaatttattcggtaacaaggaaatgagaattttgatggttggcttggatggtgctggtaagaccaccgttttgtacaaattgaagttgggtgaagttatcactaccattccaactattggtttcaacgttgaaactgtccaatacaagaacatttctttcactgtttgggatgttggtggtcaagaccgtattagatctttgtggagacactactacagaaacaccgaaggtgttattttcgtcattgactctaacgacagatccagaatcggtgaagccagagaagtcatgcaaagaatgttgaacgaagatgaattgagaaatgctgtctggttagttttcgctaacaagcaagatttgccagaagctatgtctgctgctgaaattactgaaaagttaggtttgcactctatcagaaacagaccatggttcatccaatctacttgtgctacttctggtgaaggtttatacgaaggtttggaatggttgtccaacaacttgaaaaaccaatcataa

SEQ ID NO: 4343 - DNA, 1287 bp, Artificial Sequence
  Optimized genes for Saccharomyces cerevisiae
atgactgctgccaagccaaacccatacgctgcaaaaccaggtgactacttgtccaacgttaacaatttccaattaatcgattccaccttgagagaaggtgaacaatttgctaacgccttcttcgacactgaaaagaaaattgaaattgccagagctttggatgattttggtgttgactatattgaattaacttctccagttgcttccgaacaatctagaaaggactgtgaagctatctgtaagttgggcttgaaggccaagatcttaacccacatcagatgtcacatggacgacgctaaggttgccgttgaaactggtgtggatggtgttgatgttgtcatcggtacttccaagttcttgcgtcaatactctcacggtaaggatatgaactacatcgctaaatccgctgtcgaagttattgaattcgtcaagtctaagggtatcgaaattagattctcttctgaagattctttcagatccgacttggttgatttgttgaacatctacaagactgtcgacaagattggtgtcaacagagttggtatcgccgatactgttggctgtgctaacccaagacaagtctacgaattgatcagaactttgaaatctgttgtttcttgtgatatcgaatgtcatttccacaacgataccggttgtgccattgctaatgcttacactgccttggaaggtggtgctcgtttgattgacgtctccgtcttgggtattggtgaaagaaacggtattactccattgggtggtttgatggctagaatgattgttgctgctccagattacgttaagtccaagtacaaattgcacaagatcagagacattgaaaacttggtcgctgatgctgttgaagtcaatatcccattcaacaacccaattaccggtttctgtgctttcactcacaaagctggtattcatgccaaggctattttggccaatccatctacttatgaaatcttggacccacacgatttcggtatgaagagatacattcacttcgccaacagattgactggttggaacgctatcaaggctagagtcgatcaattgaatttgaacttgaccgatgaccaaatcaaggaagttaccgctaaaatcaaaaaattaggtgatgtcagatctttgaacattgatgacgttgactccatcattaaaaacttccatgctgaagtctctaccccacaagttttgtctgctaagaagaacaagaagaacgactctgatgttccagaattggctaccattccagctgctaagagaaccaagccatccgcttaa

SEQ ID NO: 4344 - DNA, 363 bp, Artificial Sequence
  Optimized genes for Saccharomyces cerevisiae
atggctggtgttaaggcttacgaattgagaactaagtccaaggaacaattggcttcccaattagttgatttgaaaaaagaattagctgaattgaaggttcaaaagttgtccagaccatctttgccaaagatcaagactgtcagaaagtctattgcttgtgttttgactgttatcaacgaacaacaaagagaagctgttagacaattgtacaagggtaagaaataccaaccaaaggacttgcgtgctaagaagaccagagctttgagaagagccttgaccaagttcgaagcctctcaagttactgaaaagcaaagaaagaagcaaatcgctttcccacaacgtaagtacgctatcaaagcttaa

SEQ ID NO: 4345 - DNA, 546 bp, Artificial Sequence
  Optimized genes for Saccharomyces cerevisiae
atgggtctatttgcttccaagttgttttctaacttgttcggtaacaaggaaatgagaatcttgatggttggtttggatggtgctggtaagaccactgttttgtacaaattgaaattgggtgaagttatcactaccattccaactatcggtttcaacgttgaaaccgttcaatacaagaacatttctttcactgtctgggatgtcggtggtcaagacagaattagatccttatggagacactactacagaaacactgaaggtgttattttcgttgttgactctaacgatagatctagaattggtgaggctagagaagtcatgcaaagaatgttgaacgaagatgaattgagaaatgctgcttggttagttttcgctaacaagcaagatttgccagaagctatgtctgctgctgaaattaccgaaaagttaggtttgcactctatcagaaacagaccatggttcatccaagctacttgtgctacctctggtgaaggtttatacgaaggcttggaatggttgtccaactctttgaagaattctacttag

SEQ ID NO: 4346 - DNA, 471 bp, Artificial Sequence
  Optimized genes for Saccharomyces cerevisiae
atgggtaaggacaacaaggaacacaaggaatccaaggaaagtaagaccgttgataactacgaagctagaatgccagccgtcttgccattcgctaagccattggcttccaagaagttgaacaagaaggttttgaagactgttaagaaggcttctaaggccaagaacgtcaagagaggtgttaaggaagttgtcaaggctttgagaaagggtgaaaagggtttggttgttattgccggtgacatttctccagctgatgttatctctcacattccagttttgtgtgaagaccactccgttccatacattttcatcccatctaagcaagatttgggtgctgctggtgccaccaagagaccaacttctgttgttttcattgtcccaggttctaacaagaaaaaggatggtaaaaacaaagaagaagaatacaaggaatctttcaacgaagtcgttaaagaagttcaagctttataa

SEQ ID NO: 4347 - DNA, 1089 bp, Artificial Sequence
  Optimized genes for Saccharomyces cerevisiae
atgtctagaccacaagttaccgttcactccttgactggtgaagctactgctaatgctttgcctttaccagctgtcttctctgccccaattagaccagatattgtccacactgttttcacttctgtcaacaaaaacaagagacaagcttacgccgtctccgaaaaggctggtcatcaaacttccgctgaatcttggggtaccggtagagctgttgctagaattccaagagtcggtggtggtggtactggaagatctggtcaaggtgctttcggtaacatgtgtagaggtggcagaatgttcgctccaactaagacctggagaaagtggaacgttaaagttaaccacaacgaaaaaagatacgctaccgcttctgctattgctgccactgccgttgcctctttggttttggccagaggtcacagagttgaaaagatcccagaaattccattggtcgtttctactgatttggaatccattcaaaaaaccaaggaagccgttgctgctttgaaagctgttggtgcccactctgacttgctaaaggtcttgaagtccaagaaattaagagccggtaagggtaagtacagaaacagaagatggactcaaagacgtggtccattagttgtttatgctgaagacaacggtattgttaaggccttgagaaatgttccaggtgtcgaaactgctaacgtcgcttccttaaacttgttgcaattggctcctggtgctcacttgggtagattcgttatctggactgaagctgccttcaccaagttggaccaagtctggggttccgagactgtcgcatcttctaaggttggttacactttgccatctcacattatttctacctctgatgtcaccagaatcatcaactcctctgaaatccaatctgctatcagacctgctggtcaagccacccaaaagagaactcacgttttaaagaagaatccattgaagaacaagcaagttcttttgagattgaacccatacgctaaggtttttgctgctgagaagttaggttctaagaaggctgaaaagactggtacaaagccagccgctgtctttgccgaaaccttgaagcacgattaa

SEQ ID NO: 4348 - DNA, 597 bp, Artificial Sequence
  Optimized genes for Saccharomyces cerevisiae
atgccaagagttgctatcatcatttacactttgtacggtcacgttgccgccactgctgaagccgaaaagaagggtattgaagctgctggtggttctgctgatatctaccaagttgaagaaaccttgtctccagaagtcgtcaaggctttgggcggtgctccaaagccagactacccaattgctactcaagatactttgactgaatacgatgctttcttgtttggtatcccaaccagattcggtaacttcccagctcaatggaaggccttctgggacagaactggtggtttatgggctaaaggtgccttgcacggtaaggttgcaggttgtttcgtttctaccggtactggtggtggtaacgaagctaccatcatgaactctttgtccactttggctcaccatggtattatttttgttccattgggttacaagaacgttttcgctgaattaaccaacatggacgaagttcacggtggttccccatggggtgctggtaccattgccggttctgatggttccagatctccatctgccttggaattgcaagtccacgaaattcaaggtaagactttctacgaaactgttgctaagttctaa

SEQ ID NO: 4349 - DNA, 963 bp, Artificial Sequence
  Optimized genes for Saccharomyces cerevisiae
atgtctacctttgaaactttgatcaagagaggtggtaacgaagccattaagatcaacccaccaactggtgctgatttccacattacctccagaggttctgactggttttggacttgtttctgttgttacttattgtttggtttgattttgactttcttaatgttcagaaagccagtcaacgacagatttttctacttgaccggtattgctccaaacttcttcatgtgtattgcctacttcaccatggcttccaacttgggctggattccagttaaggccaagtacaaccatgttcaaacttccactcaaaaggaacacccaggttacagacaaatcttttactctagattcgttggttggttcttggctttgccatggccaatcattcaaatttgtatgttggccggtactccattctggcaaatggccttcaacgtttgtatcactgaattcttcactgtctgttggttaatcgccgcttgtgttcactctacttacaagtggggttactacactattggtttaggtgctgctattgttgtttctatctctgttatgactacttcttacaatttggtcaagcaaagagacaacgatatcagattgacatttttggttttcttttctattatcatgtttttatggatcatcgcttacccaacctgtttcggcattactgatggtggtaacgtcttgcaaccagactctgctggtatcttctacggtattattgacttgatcttgatgtgttttattcctaccttgttggttccaattgctaaccacttcggtgccgataagttgggttatcatttcggtccatctgatgctgaagctgtcatggctccaaaggctcctgttgcttctccaagaccagctgccaccccaaatttgtccaaggacaagaagaagaagtccaagaagtctaaaaaatctaagaaatccaaaaagtctgaagaataa

SEQ ID NO: 4350 - DNA, 747 bp, Artificial Sequence
  Optimized genes for Saccharomyces cerevisiae
atggctagaactttcttcgttggtggtaacttcaaattgaacggttctaagcaatctatcaaggaaattgttgaaagattgaacactgcttctattccagaaaatgtcgaagttgtcatctgtccaccagctacctacttggactactctgtttctttggttaagaaaccacaagttactgttggcgcccaaaacgcttatttgaaggcttctggtgctttcactggtgaaaactccgttgaccaaatcaaagatgtcggtgctaaatgggttattttaggtcactctgaaagaagatcttacttccacgaagatgataaattcattgctgacaagaccaagttcgctttgggtcaaggtgttggtgtcattttgtgtatcggtgaaactttagaagaaaagaaggctggtaagactttggatgtggtcgagagacaattgaatgctgttttggaagaagtcaaggattggaccaacgtcgttgttgcttacgaaccagtctgggctattggtaccggtttggctgctactccagaagacgctcaagatattcacgcttccatcagaaagtttttggcctccaagttgggtgacaaggccgcttccgaattgagaatcttgtacggtggttccgctaacggctctaacgccgtcaccttcaaggacaaagctgatgttgatggtttcttggtcggtggtgcctccttgaagccagaattcgtcgatatcatcaactctagaaactaa

SEQ ID NO: 4351 - DNA, 456 bp, Artificial Sequence
  Optimized genes for Saccharomyces cerevisiae
atgggtagaatgcactctgctggtaagggtatttcttcctctgccatcccatactctagaaatgctccagcttggttcaagttgtcttctgaatctgtcatcgaacaaattgtcaagtatgccagaaaaggtttgactccatctcaaatcggtgttttgttgagagacgctcacggtgtcactcaagctagagttatcactggtaacaagatcatgagaatcttgaagtctaacggtttagccccagaaattccagaagatttgtactatttgatcaagaaggctgtttctgttagaaagcacttggaaagaaacagaaaggacaaggatgctaagttcagattaattttgattgaatccagaattcacagattggctagatactacagaactgttgctgtcttgccaccaaactggaagtacgaaagtgctactgcttccgctttggttaactaa

SEQ ID NO: 4352 - DNA, 1017 bp, Artificial Sequence
  Optimized genes for Saccharomyces cerevisiae
atgaagttgtctactgtcttgttgtccgccggtttggcctctaccactttggctcaattctctaactccacctccgcttcttcaaccgatgttacttcttcttcctctatttctacttcatctggttctgtgaccatcacttcctccgaagctccagaatctgacaacggtactagtaccgctgctccaactgaaacctctacagaagccccaacaactgctatcccaaccaacggtacttctaccgaagccccaaccactgccattccaaccaacggtacctcaactgaagcaccaactgacactaccacagaggctccaaccactgctttaccaaccaacggtacaagcactgaagctccaactgatactacaactgaagctcctaccaccggtctaccaactaacggtactacttctgctttcccacctactacttccttgccaccatccaacactaccaccactccaccatacaacccttccactgactacactaccgattacacagttgtcactgaatacactacttattgtcctgaaccaactactttcaccactaatggtaagacttacactgttactgagccaactaccttgactattactgattgcccatgtactatcgaaaagccaacgaccaccagtactactgaatatactgttgtcactgaatacaccacttactgtccagaaccaacaaccttcactaccaatggtaagacctacaccgtcaccgaacctaccactttaaccattaccgactgtccatgtaccattgaaaaatctgaagctccagaaagttctgttcctgttaccgaatccaagggtaccaccactaaggaaactggtgttaccaccaagcaaactaccgccaacccatctttgaccgtttccactgtcgtcccagtttcttcttctgcctcctctcactctgtcgttatcaactctaatggcgctaacgttgttgttccaggtgctttgggtttagctggtgtcgctatgttgttcttgtaa

SEQ ID NO: 4353 - DNA, 489 bp, Artificial Sequence
  Optimized genes for Saccharomyces cerevisiae
atgtctcaagtttacttcgatgtcgaagctgatggtcaaccaattggtagagtcgttttcaagttgtacaacgatattgtcccaaagactgctgaaaacttcagagctttgtgtaccggtgaaaagggtttcggttacgctggttcaccattccacagagttattccagatttcatgttgcaaggtggtgacttcactgccggtaacggtactggtggtaaatctatctacggtggtaagttcccagacgaaaatttcaaaaagcatcacgacagaccaggtttgttgtccatggctaacgctggtccaaacactaatggttcccaattcttcatcaccactgttccatgtccatggttggacggtaagcacgttgtctttggtgaagttgttgatggttacgatatcgtcaagaaggttgaatctttgggttctccatctggtgctaccaaggctagaattgttgttgctaagtccggtgaattgtaa

SEQ ID NO: 4354 - DNA, 648 bp, Artificial Sequence
  Optimized genes for Saccharomyces cerevisiae
atgtctagagctaagagaatcatgaaggaaattcaagctgtcaaggatgatccagctgctcacattactttggaatttgtttccgaatctgatatccatcatttgaaaggtactttcttgggtccaccaggtaccccatacgaaggtggtaagttcgttgttgacatcgaagttccaatggaatacccattcaagccaccaaagatgcaattcgacaccaaggtttaccacccaaacatttcttctgttactggtgctatctgtttggatattttgaagaacgcttggtctccagttatcaccttgaagtctgctttgatctctttgcaagccttgttacaatctccagaaccaaatgaccctcaagatgctgaagtcgctcaacactacttgagagacagagaatctttcaacaagactgctgccttatggactagattgtacgcttctgaaacttctaacggtcaaaagggtaacgttgaagaatccgatttgtacggtattgatcatgacttgattgacgaattcgagtctcaaggtttcgaaaaggacaagattgtcgaagttttgagaagattaggtgttaagtccttggacccaaacgacaacaacactgccaacagaattattgaagaattgttgaaataa

SEQ ID NO: 4355 - DNA, 546 bp, Artificial Sequence
  Optimized genes for Saccharomyces cerevisiae
atgatgcttccaagatccatgaagttcatgactggtagaagaattttccacactgctactgtcagagctttccaatctactgccaagaagtccttgaccattccattcttgccagttttgccacaaaagccaggtggtgttagaggtactccaaacgatgcttacgttcctccaccagaaaacaagttggaaggttcctaccactggtacatggaaaagatctttgctttgtctgtcgttccattggctaccactgctatgttgactaccggtccattatctaccgctgctgattctttcttctctgttatgttgttgggttactgttacatggaattcaactcctgtatcactgactacatttccgaaagagtttacggtgtctggcacaagtacgccatgtacatgttaggtttgggttctgctgtttctttgttcggtatttacaagttagaaactgaaaatgatggtgttgttggtttagtcaagtctttatgggactcttctgaaaaggacaactctcaaaagattgaagctaagaaataa

SEQ ID NO: 4356 - DNA, 396 bp, Artificial Sequence
  Optimized genes for Saccharomyces cerevisiae
atgtctgctaaagctgaaaagaaaccagcctccaaggctccagctgaaaaaaagccagctgccaagaagacttctacttccaccgatggtaagaagagatctaaggctagaaaggaaacttactcctcttacatctacaaggttttgaagcaaactcatccagacactggtatttctcaaaagtccatgtccatcttgaactctttcgttaacgatattttcgaaagaattgctactgaagcttctaagttggctgcttacaacaagaagtctaccatctctgccagagaaattcaaaccgccgtcagattgattttgccaggtgaattggctaagcacgctgtttctgaaggtaccagagctgtcaccaagtactcttcttccactcaagcttaa

SEQ ID NO: 4357 - DNA, 399 bp, Artificial Sequence
  Optimized genes for Saccharomyces cerevisiae
atgtctggtggtaagggtggtaaagctggttctgccgccaaggcctcccaatctagatctgcaaaggctggtttgactttcccagttggtagagttcacagattgttgagaagaggtaactacgctcaaagaattggttccggtgctccagtctacttgaccgctgtcttggaatacttagctgctgaaattttggagttggccggtaatgctgccagagacaacaaaaagaccagaatcattccaagacacttgcaattggctatcagaaacgatgatgaattgaacaagttgttgggtaacgttaccattgctcaaggtggtgttttgccaaacattcaccaaaacttgttaccaaagaagtctgctaaggctaccaaggcttctcaagaattataa

SEQ ID NO: 4358 - DNA, 669 bp, Artificial Sequence
  Optimized genes for Saccharomyces cerevisiae
atgtcttcctctgaatctatcagaatggttttgatcggtccaccaggtgctggtaagggtacccaagctccaaacttgcaagaaagattccacgctgctcacttggctactggtgacatgttgagatcccaaattgccaagggtactcaattgggtttagaagctaagaagatcatggatcaaggtggtttggtctctgatgacattatggtcaacatgatcaaggacgaattgaccaacaacccagcttgtaagaacggtttcatcttggatggtttcccaagaaccattccacaagctgaaaaattggaccaaatgttgaaagaacaaggtactccattggaaaaggctattgaattaaaggttgacgatgaattgttggttgctagaatcactggtagattgattcacccagcctctggtcgttcttaccacaagattttcaaccctccaaaggaagatatgaaggatgatgttactggtgaagccttagttcaaagatctgacgacaacgctgacgctttgaagaagagattagccgcttaccatgctcaaactgaaccaattgtcgatttctacaagaagaccggtatctgggccggtgttgatgcttctcaaccacctgctaccgtctgggctgatattttgaacaagttgggtaaagattaa

SEQ ID NO: 4359 - DNA, 888 bp, Artificial Sequence
  Optimized genes for Saccharomyces cerevisiae
atgtctgcttccgctcaacattcccaagcccagcaacaacaacaacaaaaatcttgtaactgtgatttgttattatggagaaacccagttcaaactggtaagtacttcggtggttctttgttggccttgttgattttgaagaaggtcaacttaattactttctttttgaaagttgcctacaccattttattcactaccggttccattgaattcgtttctaaattgttcttgggtcaaggtttgatcactaaatacggtccaaaggaatgtccaaacattgctggtttcatcaagcctcacattgatgaagctttgaagcaattgccagttttccaagctcacatcagaaagaccgtctttgcccaagttccaaagcacactttcaagactgctgtcgctttgtttttattgcacaagttcttctcttggttctccatctggactattgtttttgttgctgacattttcaccttcactttgcctgttatctaccactcttacaagcatgaaattgacgctactgttgctcaaggtgtcgaaatctccaaacaaaagactcaagaattttctcaaatggcttgtgaaaaaactaagccatacttggacaaggttgaatccaagttaggtccaatttctaacttggtcaagtccaagaccgctccagtctcttctactgccggtcctcaaaccgcctccacttctaagttggctgctgatgtcccattggaacctgaatctaaggcttacacttcctctgctcaagtcatgccagaagttccacaacacgaaccatctaccacccaagagttcaacgttgacgaattgtctaatgaattgaagaaatccaccaagaatttgcaaaacgaattagaaaagaacaacgcttaa

SEQ ID NO: 4360 - DNA, 168 bp, Artificial Sequence
  Optimized genes for Saccharomyces cerevisiae
atggactctgctaagatcatcaacattattttgtctttgtttttgccaccagttgctgttttcttggctagaggttggggtactgactgtatcgttgacattatcttgaccattttagcttggttcccaggtatgttgtacgctttgtacattgttttgcaagattaa

SEQ ID NO: 4361 - DNA, 291 bp, Artificial Sequence
  Optimized genes for Saccharomyces cerevisiae
atgtctactgttaacgttttgagatactctgctttgggtttaggtttgttcttcggtttcagaaacgatatgattttgaagtgtaacgccaagaagaaagaagaacaagctcaatacgaagaaaagttgaaattggtcgaagaagctaagaaggaatacgctaaattacatccagttgttactccaaaggatgttccagctaatgcttctttcaacttggaagacccaaacattgacttcgaaagagttatcttgaacgctgttgaatctttgaaggaagcctccacttag

SEQ ID NO: 4362 - DNA, 1824 bp, Artificial Sequence
  Optimized genes for Saccharomyces cerevisiae
atggcttccactgctaacatgatctctcaattgaagaagttgtccatcgctgaaccagctgtcgctaaggactctcatccagatgttaacattgtcgatttgatgagaaactacatctcccaagaattatctaagatttccggtgttgactcctctttgattttcccagctttggaatggactaacaccatggaaagaggtgatctattaattccaatcccaagattaagaattaaaggtgccaacccaaaggatttagccgtccaatgggctgaaaagttcccatgtggtgattttttagaaaaggttgaagccaatggtcctttcatccaattcttcttcaatccacaatttttggccaagttagttattccagacatcttgactagaaaagaagactacggttcttgtaagttggttgaaaataagaaggtcatcattgaattttcttctccaaacattgccaagccattccacgccggtcatttgagatccaccattattggtggtttcttggctaacttgtacgaaaaattgggttgggaagttatcagaatgaactacttgggtgactggggtaagcaatttggtttgttagctgtcggtttcgaaagatatggtaacgaggaagctttagtcaaggacccaattcaccacttgttcgacgtctacgttagaatcaacaaagacattgaggaagaaggtgattctatcccattggaacaatctaccaacggtaaagctcgtgaatacttcaagagaatggaagatggtgacgaagaagctttgaagatctggaagagattcagagaattctctattgaaaagtacattgatacttacgctagattgaacatcaaatacgatgtttactctggtgaatctcaagtctccaaggaatccatgttaaaggctattgacttgtttaaggagaagggtttaactcatgaagacaagggcgccgttttgatcgatttgaccaaattcaacaagaaattaggtaaggccattgttcaaaagtctgacggtaccactttgtatttgacaagagacgttggtgctgctatggacagatacgaaaagtaccacttcgataagatgatctacgtcattgcttcacaacaagacttgcacgctgctcaattctttgaaattttgaaacaaatgggttttgaatgggctaaagatttgcaacacgtcaacttcggtatggttcaaggtatgtctaccagaaagggtactgtcgttttcttggacaacatcctagaagaaaccaaggaaaaaatgcacgaagtcatgaagaagaacgaaaacaagtatgcccaaatcgaacacccagaagaagttgctgacttggtcggaatttctgctgttatgattcaagatatgcaaggtaagcgtatcaacaactatgaattcaagtgggaacgtatgttgtctttcgaaggtgacactggtccatacctacaatatgctcactctagattgagatctgttgagagaaatgcttctggtattactcaagagaaatggattaacgctgatttctccttattgaaggaacctgccgctaagttgttgattagattgttgggccaatacccagatgtcttgagaaacgccatcaagactcacgaaccaactactgttgttacctacttattcaaattgacccaccaagtttcttcctgttacgacgtcttatgggttgctggtcaaactgaagaattggctaccgctagactagccttgtacggtgctgccagacaagttttatacaacggtatgcgtttgctaggtttgactccagtcgaaagaatgtga

SEQ ID NO: 4363 - DNA, 1713 bp, Artificial Sequence
  Optimized genes for Saccharomyces cerevisiae
atgtctcaagatgctgctattgctgaacaaaccccagttgaacacttgtccgctgttgactccgcatctcactctgtcttatctacaccaagtaacaaagctgaaagagatgaaatcaaggcttatggtgaaggtgaggaacatgaaccagtcgtggaaattccaaaaagaccagcttctgcttacgtcactgtttccattatgtgtatcatgattgctttcggtgggttcgttttcggttgggacactggtaccatttccggtttcattaaccaaactgatttcatcagaagattcggtatgaagcacaaggatggtactaattatttgtcaaaggtcagaaccggtttaattgtcagtatcttcaacattggctgtgccattggtggtattatcttgtctaaattgggtgatatgtacggtagaaaggttggtctaatcgtcgtcgttgttatctacatcatcggtatcatcattcaaatcgcctctatcaacaagtggtaccaatactttattggtagaattatttctggtttgggtgtcggtggtattgccgttttgtctccaatgttgatctctgaagtttccccaaagcatttgagaggtactttagtttcttgttaccaattgatgattactgccggtatctttttaggttactgtaccaactttggtactaagaactattccaactccgttcaatggagagttcctctaggtttgtgtttcgcttgggctttgtttatgatcggtggtatgacttttgtcccagaatctccaagatacttggccgaagtcggtaagattgaagaagccaagagatctattgccgtctctaacaaggttgctgtcgacgacccatctgttttggctgaggtcgaagctgtcttggctggtgttgaagctgaaaagttggcaggtaatgcttcttggggtgaattgttctcttctaagaccaaggtgttacaaagattaatcatgggtgctatgatccaatctttgcaacaattaaccggtgacaactacttcttctactatggtaccactattttcaaggctgttggtctttctgactctttcgaaacctctatcgttttaggcattgttaattttgcctctacctttgttggtatttacgttgtagaacgttacggtagaagaacttgtttactatggggtgccgcttccatgactgcttgcatggttgtctacgcttccgttggagttaccagattgtggccaaacggtcaagaccaaccatcttccaagggtgctggtaactgtatgattgtttttgcttgtttttacattttctgtttcgctactacctgggctccaatcccatacgttgttgtctccgaaactttcccattaagagtcaagtccaaggccatgtccatcgctaccgctgccaactggttatggggtttcttgattggttttttcactccattcatcactggtgctatcaacttctactacggttatgttttcatgggttgtttggtcttcatgttcttttatgtcttgttggttgttccagaaacaaaaggtttgactttggaagaagttaacaccatgtgggaagaaggtgttttgccatggaagtctgcctcctgggttccaccatccagacgtggtgctaactacgacgctgaagaaatgacccacgatgacaagccattgtacaagagaatgttttctactaaataa

SEQ ID NO: 4364 - DNA, 1713 bp, Artificial Sequence
  Optimized genes for Saccharomyces cerevisiae
atgtcccaagatgctgctatcgctgaacaaactccagttgaacatttgtccgctgttgactctgcctctcactctgttttatccaccccaagtaacaaagctgaaagagatgaaatcaaggcttacggtgaaggtgaggaacacgaaccagtcgtcgaaattccaaaaagaccagcttctgcttatgttactgtttccatcatgtgtatcatgattgctttcggcggtttcgttttcggttgggataccggtactatttctggtttcatcaaccaaaccgatttcattagaagattcggtatgaagcacaaggatggtactaattatttgtccaaggtcagaactggtttgatcgtttctatcttcaacattggttgtgctattggtggtatcatcttgtcaaagttgggtgatatgtacggtagaaaggttggtttaattgttgttgttgttatttacatcatcggtattatcattcaaatcgccagcatcaataaatggtaccaatactttatcggtagaattatttccggtcttggtgtcggtggtattgccgtcttgtctccaatgttgatctccgaagtttccccaaagcatttaagaggtactttggtttcttgttaccaattgatgattactgctggtatcttcttgggttactgtaccaactttggtaccaagaactactctaactctgtccaatggagagttccattaggtttgtgtttcgcttgggctttgttcatgattggtggtatgacttttgtcccagaatctccaagatacttggctgaagtgggtaagattgaagaagctaagagatctattgctgtctccaacaaggttgctgtcgatgatccatccgttttggctgaagtcgaagctgtgttggccggtgtggaagccgaaaagttagctggtaatgcttcttggggtgaattgttctcttctaagactaaagttttacaaagattgattatgggtgctatgatccaatctttgcaacaattgactggtgacaactatttcttttattatggtaccaccattttcaaggctgttggtctatctgattctttcgaaacttccattgttctaggtattgtcaacttcgccagtaccttcgtcggtatctacgtcgttgaacgttacggtcgtagaacctgtttgttgtggggtgctgcctccatgaccgcttgtatggttgtctacgcttcagttggtgttaccagattatggccaaacggtcaagaccaaccatcctctaaaggtgctggtaactgtatgatcgtctttgcctgtttctacattttctgttttgctactacctgggctccaatcccatacgttgttgtctctgaaactttcccattgagagtcaagtccaaggccatgtctattgccactgccgctaactggttatggggttttttgattggatttttcactccattcatcactggcgccattaacttttactacggttatgtcttcatgggttgcttagtttttatgttcttctacgttcttttggtcgttcctgaaaccaagggtttgaccttggaagaagttaacaccatgtgggaagaaggtgttttgccatggaagtctgcttcctgggttccaccatctagaagaggtgccaactacgatgccgaagaaatggctcacgatgacaagccattgtacaagagaatgttttctaccaaataa

SEQ ID NO: 4365 - DNA, 333 bp, Artificial Sequence
  Optimized genes for Saccharomyces cerevisiae
atgaagtacttggctgcttacttattattggttcaaggtggtaacgctgctccatctgccgctgatatcaaggctgttgttgaatccgttggtgctgaagttgatgaagccagaatcaacgaattgttgtcttccttagaaggtaagggttctttggaagaaattattgctgaaggtcaaaagaagttcgctactgttccaactggtggcgcttcttctgctgctgctggtgctgccggtgccgccgctggtggtgatgctgccgaagaggaaaaggaagaagaagctaaggaagaatctgatgatgacatgggtttcggtttgttcgattaa

SEQ ID NO: 4366 - DNA, 498 bp, Artificial Sequence
  Optimized genes for Saccharomyces cerevisiae
atgccacctaagttcgacccaaacgaagttaagtacttgtacttgagagctgttggtggtgaagtcggtgcttctgctgctttggctccaaagattggtccattgggtttgtctccaaagaaggttggtgaagatattgctaaggctactaaggaattcaagggtattaaggtcactgttcaattgaagatccaaaacagacaagctgccgcttccgttgttccatctgcctcttctttggttatcactgccttgaaagaaccaccaagagatagaaagaaggacaaaaacgtcaagcactctggtaacattcaattagatgaaatcatcgaaattgccagacaaatgagagacaagtctttcggtagaactttggcctctgttaccaaggaaatcttgggtactgctcaatctgtcggttgtagagttgatttcaagaacccacacgacattattgaaggtatcaacgctggtgaaattgaaattccagaaaactaa

SEQ ID NO: 4367 - DNA, 564 bp, Artificial Sequence
  Optimized genes for Saccharomyces cerevisiae
atgtctagaccaattgttatctctggtccatccggtaccggtaaatccactttgttgaagaagttgtttgctgaatacccagactctttcggtttctccgtctcttctaccaccagaactccaagagctggtgaagttaacggtaaggactacaacttcgtttccgttgatgaattcaagtccatgatcaagaacaacgaatttattgaatgggctcaattctctggtaactactacggttctactgttgcttctgtcaagcaagtttctaagtctggtaagacttgtatcttggatattgacatgcaaggtgttaaatctgttaaggccattccagaattgaacgctagattcttgttcattgctccaccatctgttgaagatttgaagaagagattggaaggtagaggtactgaaaccgaagaatctatcaacaagcgtttgtctgctgctcaagctgagttggcttacgctgaaactggtgctcacgataaggttattgtcaacgatgacttggacaaggcttacaaggaattaaaggatttcatcttcgctgaaaaataa

SEQ ID NO: 4368 - DNA, 411 bp, Artificial Sequence
  Optimized genes for Saccharomyces cerevisiae
atggctaagttcttgaaggctggtaaagttgctgttgttgtcagaggtagatacgctggtaagaaagtcgttattgttaagccacacgatgaaggttctaaatctcatccattcggtcacgctttggttgccggtattgaacgttacccatccaaggttaccaagaagcacggtgctaaaaaggtcgctaagagaactaagatcaaacctttcatcaaggttgtcaactacaaccatttgttgccaaccagatacactttggatgttgaagctttcaagtctgttgtttctactgaaactttcgaacaaccatctcaaagagaagaagccaagaaggtcgtcaagaaggcctttgaagaaagacaccaagctggtaagaaccaatggttcttctctaagttgagattctaa

SEQ ID NO: 4369 - DNA, 1755 bp, Artificial Sequence
  Optimized genes for Saccharomyces cerevisiae
atgggtattcacattccatacttgacttctaagacttctcaatccaatgttggtgacgctgttggtaacgctgactctgttgaattcaactctgaacacgattctccatccaagcgtggtaagattaccttagaatctcacgaaattcaaagagctccagcttctgatgacgaagacagaattcaaatcaagccagtcaacgatgaagatgatacctctgtcatgatcactttcaaccaatctctatccccattcatcatcactttgaccttcgttgcctctatttctggtttcatgttcggttacgatacaggttacatctcctccgctttgatctctatcggcaccgacttggaccacaaggttttaacttacggtgaaaaggaaattgtcactgccgctacatcattaggtgctttaatcacctccatctttgctggtactgctgctgatatctttggtagaaaaagatgtttgatgggttccaacttgatgtttgttatcggtgctattctacaagtttctgctcacactttctggcaaatggctgtcggtagattgatcatgggtttcggtgttggtattggtagtttaattgccccattgttcatttccgaaattgctccaaagatgattagaggtcgtttaaccgtcatcaactccttatggttgaccggtggtcaattggttgcttacggctgtggtgccggtttgaactacgttaacaacggttggagaatcttggtcggtttatctttgattccaaccgctgttcaatttacttgtttgtgtttcttgccagatactccaagatactacgttatgaagggtgatttggccagagccactgaagttttgaagagatcttacactgacacttctgaagaaatcattgaaagaaaggtcgaagagttagttactttgaatcaatctatcccaggtaagaacgtcccagaaaaagtctggaacactattaaggagttgcacaccgttccatctaacttgagagctttgattattggttgtggtttacaagctatccaacaattcactggttggaattctttaatgtacttttcaggtaccatttttgaaactgttggattcaagaattcctctgccgtttccattattgttagtggtaccaactttattttcaccttggtagcctttttctccattgacaagatcggtagaagaaccattttgttgattggtttgcctggtatgaccatggccctagttgtttgttctattgctttccacttcttgggtatcaagttcgatggtgctgtcgccgtcgttgtctcttctggtttctcttcctggggtatcgtcattatcgtttttatcattgttttcgctgctttctacgccttgggtattggtacagttccatggcaacaaagtgaattattcccacaaaacgttagaggtatcggtacttcctacgctaccgctactaactgggctggttctttggttattgcatctacctttttgactatgttgcaaaacattactcctgctggtacttttgccttcttcgccggtctatcttgtttgtctactatcttctgctacttctgttacccagaattgtccggtttggaattggaagaagtccaaaccatcttaaaggacggttttaacatcaaagcttccaaggctttggctaagaagagaaagcaacaagtcgctagagttcatgaattgaagtacgaaccaactcaagaaatcatcgaagatatttaa

SEQ ID NO: 4370 - DNA, 267 bp, Artificial Sequence
  Optimized genes for Saccharomyces cerevisiae
atgggtaagggtactccatctttcggtaaaagacacaacaagtctcacactttgtgtaacagatgtggtcgtagatccttccatgttcaaaagaagacttgttcttcttgtggttacccatccgctaagaccagatctcataactgggctgctaaagctaagagaagacatactaccggtaccggtagaatgagatacttgaagcacgtttccagaagattcaagaacggtttccaaactggttctgccaaggctacttctgcttaa

SEQ ID NO: 4371 - DNA, 384 bp, Artificial Sequence
  Optimized genes for Saccharomyces cerevisiae
atgccacaatctttcacttctattgccagaattggtgactacattttgaaatctccagtcttgtccaagttgtgtgttccagttgctaaccaattcatcaacttggctggttacaagaagttgggtttgaagttcgatgatttgattgctgaagaaaacccaatcatgcaaaccgctttgagaagattgccagaagacgaatcttacgctagagcttacagaatcatcagagctcaccaaactgaattgactcaccacttgttgccaagaaacgaatggatcaaggctcaagaagatgttccttacttgttaccatacatcttggaagctgaagccgctgctaaggaaaaggatgaattggacaacattgaagtttctaaataa

SEQ ID NO: 4372 - DNA, 846 bp, Artificial Sequence
  Optimized genes for Saccharomyces cerevisiae
atgtctgaataccaaccatctttgttcgctttgaacccaatgggtttctccccattggatggttctaaatctaccaacgaaaacgtctctgcttctacatctactgccaagccaatggttggtcaattgatttttgacaagttcatcaagaccgaagaagatccaatcatcaaacaagatactccatccaacttggacttcgactttgctttaccacaaactgctaccgctccagatgccaagactgtcttgcctattccagaattggatgacgctgtcgtcgaatctttcttctcttcctccactgactctactcctatgttcgaatatgaaaacttggaagacaactccaaggaatggacttccttattcgataacgatattccagtcactaccgatgatgtttccttggctgacaaggctattgaaagtactgaagaagtttctttagttccatctaacttggaagtctccaccacttctttcttgccaaccccagttttggaggatgctaagttgactcaaaccagaaaggtcaagaaaccaaactctgttgttaagaagtctcaccacgtcggtaaggacgatgaatccagattagatcatttgggtgttgtcgcttacaacagaaagcaaagatccatcccattatctccaattgttcctgaatcttctgacccagctgctttgaagagagctagaaacactgaagctgccagaagatctagagccagaaaattgcaaagaatgaagcaattagaagataaggttgaagagttgttgtctaagaactaccacttggaaaatgaagttgctagattgaagaagttggttggtgaaagataa

SEQ ID NO: 4373 - DNA, 132 bp, Artificial Sequence
  Optimized genes for Saccharomyces cerevisiae
atgttgatgtctactttgccaggtggtgttattttggttttcatcttggtcggtttggcttgtattgctattatttctaccatcatctacagaaagtggcaagctagacaaagaggtttgcaaagattctaa

SEQ ID NO: 4374 - DNA, 648 bp, Artificial Sequence
  Optimized genes for Saccharomyces cerevisiae
atgttgggtattagatcttccgtcaagacttgtttcaagccaatgtccttgacttccaagagattgatttctcaatctttgttggcttctaagtctacttacagaaccccaaacttcgacgatgtcttgaaggaaaacaacgatgctgacaaaggtcgttcttacgcttacttcatggttggtgctatgggtttgttgtcttctgccggtgccaagtccactgtcgaaactttcatttcctccatgactgctaccgctgatgttttggccatggctaaggttgaagttaacttagctgctattccattaggtaagaacgttgttgtcaaatggcaaggtaaaccagttttcatcagacacagaactccacacgaaattcaagaagccaactccgttgacatgtctgctttgaaggatcctcaaactgacgctgacagagttaaggacccacaatggttgatcatgcttggtatctgtacccacttgggttgtgttccaattggtgaagctggtgatttcggtggttggttctgtccatgtcacggttctcactacgatatctctggtagaatcagaaagggtccagctccattgaacttggaaatcccagcctacgaattcgatggtgacaaggtcattgtcggttaa

SEQ ID NO: 4375 - DNA, 483 bp, Artificial Sequence
  Optimized genes for Saccharomyces cerevisiae
atgactgaattgtgtccagtctacgctccattcttcggtgccatcggttgtgcttctgctatcattttcacttctttaggtgctgcttacggtactgctaagtctggtgttggtatctgtgccacttgtgttttgagaccagatttgttgttcaagaacatcgttccagttatcatggctggtattattgccatttatggtttagttgtttctgtcttggtttgttactctttgggtcaaaagcaagctttatacactggtttcatccaattgggtgctggcttgtctgttggattgtccggtttggctgccggttttgctattggtattgtcggtgatgctggtgtcagaggttcttctcaacaaccaagattgtttgttggtatgattttgatcttgatcttcgctgaagttctaggtttgtacggtttgattgttgctttgttattgaactccagagctactcaagatgttgtctgttga

SEQ ID NO: 4376 - DNA, 474 bp, Artificial Sequence
  Optimized genes for Saccharomyces cerevisiae
atgtctgatgaagaacacactttcgaaaccgctgatgctggttcttctgccacttacccaatgcaatgttccgctttgagaaagaacggttttgttgtcatcaagtctagaccatgtaagattgttgacatgtccacttccaagactggtaagcacggtcacgctaaggttcacttggttgctattgacattttcaccggtaagaagttggaagatttgtctccatctactcacaacatggaagttccagttgttaagagaaacgaataccaattgttggatattgatgacggtttcttgtccttgatgaacatggatggtgacaccaaggatgatgtcaaggctccagaaggtgaattgggtgattctttgcaaactgctttcgacgaaggtaaggacttgatggttaccattatttctgctatgggtgaagaagccgctatctctttcaaggaagctgctagaactgattaa

SEQ ID NO: 4377 - DNA, 498 bp, Artificial Sequence
  Optimized genes for Saccharomyces cerevisiae
atgccacctaagttcgacccaaacgaagttaagtacttgtacttgagagctgttggtggtgaagtcggtgcttctgctgctttggctccaaagattggtccattgggtttgtctccaaagaaggtcggtgaagatattgctaaggctaccaaggaattcaagggtatcaaggttactgttcaattgaagatccaaaacagacaagctgccgcttccgttgttccatctgcctcttctttggttatcactgccttgaaagaaccaccaagagacagaaagaaggacaagaacgtcaagcactctggtaacattcaattagatgaaatcattgaaattgccagacaaatgagagataagtctttcggtagaactttggcctccgtcactaaggaaatcttgggtactgctcaatctgttggttgtagagttgatttcaaaaacccacacgatatcatcgaaggtattaacgctggtgaaattgaaattccagaaaactaa

SEQ ID NO: 4378 - DNA, 765 bp, Artificial Sequence
  Optimized genes for Saccharomyces cerevisiae
atggcttacaccaagattgccttgtttgctgctattgctgctttggcttctgctcaaacccaagaccaaatcaacgaattgaacgttattttgaacgatgtcaagtctcatttgcaagaatacatttctttagcttctgactcctcttctggtttctccttgtcttccatgccagctggtgttttggacattggtatggccttggcctctgctaccgatgactcttacactactttgtactctgaagttgatttcgccggtgtctccaagatgttgaccatggttccatggtactcctccagattggaaccagctttgaagtctttgaatggtgatgcttccagttctgccgctccatcctcttctgccgcacctactagtagtgctgccccttcttcatcagctgctccaacttctagtgccgcctcctcctcatctgaagctaagtcatcctccgccgctccatcaagcagtgaagctaaatccagctctgctgccccatcttcttccgaagccaaatcttcttctgctgccccatcttcttccgaggccaagtcctcttccgctgctccatcttctaccgaagctaagatcacctctgctgctccttcctctactggtgccaagacttccgctatctctcaaatcactgatggtcaaattcaagctactaaagctgtttctgaacaaactgaaaacggtgctgctaaggctttcgttggtatgggtgctggtgttgttgctgcagctgctatgttattataa

SEQ ID NO: 4379 - DNA, 366 bp, Artificial Sequence
  Optimized genes for Saccharomyces cerevisiae
atggctcaaagagttactttcagaagaagaaacccatacaacactagatctaacaagatcaaggtcgttaaaactccaggtggtattttgagagcccaacacgttaagaagttggctaccagaccaaagtgtggtgactgtggttctgctttgcaaggtatctctactttgcgtccaagacaatacgctactgtttccaagactcacaagaccgtctcccgtgcttacggtggttccagatgtgctaactgtgtcaaagaaagaatcatcagagctttcttgattgaagaacaaaagattgtcaagaaggttgtcaaggaacaaactgaagctgctaaaaagtctgaaaagaaggctaagaaataa

SEQ ID NO: 4380 - DNA, 408 bp, Artificial Sequence
  Optimized genes for Saccharomyces cerevisiae
atgtctgatgctgttactatcagaaccagaaaggttatttctaacccattgttggctagaaaacaattcgttgttgatgttttgcatccaaacagagctaacgtttccaaggatgaattgagagaaaagttggctgaagtttacaaggctgagaaggacgctgtctctgttttcggtttcagaactcaatttggtggtggtaaatctgtcggttttggtttggtctacaactccgttgctgaagctaagaagttcgaaccaacttacagattggttagatacggtttagctgaaaaggtcgaaaaagcttccagacaacaaagaaagcaaaagaagaacagagacaagaagatcttcggtactggtaagagattagccaagaaagttgccagaagaaacgctgattaa

SEQ ID NO: 4381 - DNA, 2304 bp, Artificial Sequence
  Optimized genes for Saccharomyces cerevisiae
atggttcaaagtgccgtcttaggtttccctcgtattggtccaaatagagaattgaaaaaggctactgaaggttactggaacggtaagataaccgtcgacgaattattcaaggttggtaaggacttgagaactcaaaactggaaattacaaaaggaagctggtgttgacattattccatccaatgacttttccttctacgaccaagttttggacttatctttgttatttaacgttatcccagatcgttacaccaagtacgatttgtctccaattgacactttgtttgctatgggtcgtggtttgcaaagaaaggctaccgaaactgaaaaggctgttgacgtcactgctttggaaatggtcaaatggttcgattctaactaccactacgtcaggccaactttctccaagactacccaattcaaattaaacggtcaaaagccagtcgatgaatttttagaagctaaagaattgggtattcacactagaccagtcttgctaggtccagtttcttacttgttcttgggtaaggctgacaaggactctttggatttggaacctttatccttattggagcaattgttgcctttgtacactgaaatcttgagcaaattggcttctgctggtgccaccgaagttcaaatcgacgaaccagttttagttcttgatctaccagctaatgctcaagccgctattaagaaggcttatacttatttcggtgaacaatccaacttgccaaagattactttagctacttacttcggtactgttgttccaaatttggacgctatcaagggtctacctgttgctgccttgcacgttgacttcgtcagagctccagaacaatttgacgaggtcgttgctgccatcggtaacaagcaaaccttgtccgttggtatcgttgatggtagaaacatctggaagaacgatttcaagaaatcttctgccattgttaacaaagccattgaaaagttgggtgctgatagagtggttgtcgcaacttcctcttccttgttgcatactccagtggatttgaacaacgaaaccaagctagatgctgaaatcaaaggattcttctcctttgccactcaaaagttggatgaagttgttgtcattaccaaaaacgtctctggccaagatgttgctgctgctttggaagccaacgctaagtctgtcgaatccagaggtaaatccaagtttattcatgatgctgctgtcaaggccagagttgcctctattgatgaaaagatgtccaccagagccgccccattcgaacaaagattgccagaacaacaaaaggttttcaacttgccattgttcccaaccaccactattggctctttcccacaaactaaggatatcagaatcaacagaaacaagttcaacaagggtaccatctccgctgaagaatacgaaaaattcatcaactctgaaattgaaaaagttattagattccaagaagaaattggtttggacgttttggttcacggtgagcctgaaagaaatgatatggtccaatactttggtgaacaaattaatggttacgctttcactgtcaatggctgggttcaatcatacggttctagatacgttagaccaccaatcattgtcggtgacttgtctcgtccaaaggccatgtctgttaaggaatctgtctacgcccaatctatcacctccaaaccagttaaaggtatgttgactggtcctatcacttgtttgagatggtctttcccaagagacgatgttgatcaaaaaacccaagctatgcaattagcattggccttaagagatgaagtcaacgacctagaagcagccggtatcaaggtcatccaagtcgacgaaccagctttgcgtgaaggtttaccattgagagaaggtacagaaagatctgcttactacacttgggctgctgaagcttttagagtcgccacttctggtgtcgctaacaagacccagattcactctcacttctgttactctgatttagacccaaaccacattaaagctttagatgccgatgtcgtctccatcgaattctctaagaaggatgacgccaattacattgctgaattcaagaactatccaaaccatatcggtcttggtctgttcgacatccactccccaagaattccatctaaagatgagttcattgccaagatctctaccattttgaagtcctacccagccgaaaagttctgggttaacccagactgtggtttgaagacaagaggttgggaagagacccgtttgtcattgacccacatggttgaagccgccaaatacttcagagaacagtacaagaactaa

SEQ ID NO: 4382 - DNA, 618 bp, Artificial Sequence
  Optimized genes for Saccharomyces cerevisiae
atgtctgatccatcttccattaacggtggtattgttgttgctatgaccggtaaagactgtgttgccattgcttgtgatttgagattgggttcccaatctttaggtgtttctaacaagtttgaaaagatcttccactacggtcacgttttcttgggtattactggtttggctactgatgttaccactttgaacgaaatgttcagatataagaccaacttatacaagttgaaggaagaaagagctattgaacctgaaaccttcactcaattggtctcctcttctttgtacgaaagaagattcggtccatacttcgttggtccagttgtcgctggtatcaactccaagtctggtaagccattcattgccggtttcgacttgattggttgtatcgatgaagctaaggatttcatcgtttccggtactgcttctgaccaattatttggtatgtgtgaatctctatatgaaccaaacttggaaccagaagatttattcgaaactatttctcaagctttgttgaatgctgctgacagagatgctttgtctggttggggtgctgtcgtttacatcatcaagaaggacgaagttgttaagagatacttgaagatgagacaagattaa

SEQ ID NO: 4383 - DNA, 804 bp, Artificial Sequence
  Optimized genes for Saccharomyces cerevisiae
atgtctacttctcgtgaagattctgtttacttagccaagttggccgaacaagctgaaagatatgaagaaatggttgaaaacatgaaaactgttgcttcctctggccaagaattatccgtcgaagaaagaaacttattgagtgttgcctacaagaacgttattggtgctagaagagcttcttggagaattgtttcttctattgaacaaaaggaagaatctaaagaaaaatctgaacaccaagttgagttgatctgttcttacagatctaagatcgaaactgaattgaccaagatttctgatgatattttgtctgtcttggactctcatttgattccatctgctaccactggtgaatccaaggtcttctactacaagatgaagggtgactaccacagatacttggctgaattctcttccggtgatgccagagaaaaggccaccaacgcttctttggaagcttacaagactgcttctgaaattgccactaccgaattgccaccaactcatccaatcagattgggtttggctttgaacttctccgttttctattacgaaatccaaaactctccagacaaggcttgtcacttggctaagcaagctttcgatgacgctattgctgaattggatactttgtccgaggaaagttataaggactccactttaatcatgcaattgttgagagacaacttgactttatggacttccgacatgtccgaatctggtcaagccgaagaccaacaacaacagcaacaacatcaacaacaacaaccaccagctgctgccgaaggtgaagctccaaagtaa

SEQ ID NO: 4384 - DNA, 330 bp, Artificial Sequence
  Optimized genes for Saccharomyces cerevisiae
atgtctgacgctggtagaaagggtttcggtgaaaaagcttctgaagctttgaagccagactctcaaaagtcttacgctgaacaaggtaaggaatatattactgacaaggctgataaggtcgccggtaaggttcaaccagaagacaacaagggtgttttccaaggtgtccacgattctgctgaaaagggcaaggacaatgctgaaggtcaaggcgaatctttggctgaccaagctagagactacatgggtgctgctaagtccaagttgaacgatgctgttgaatacgtttctggtagagttcacggtgaagaagatccaaccaagaaataa

SEQ ID NO: 4385 - DNA, 621 bp, Artificial Sequence
  Optimized genes for Saccharomyces cerevisiae
atgaactctgaatatgattacttgttcaaattgttattgattggtaactccggtgtcggtaaatcttgtttgctattgagattttctgatgacacttacaccaacgactacatttctaccatcggtgttgatttcaagatcaagaccgttgaattggacggtaagactgtcaagttacaaatctgggatactgctggtcaagaaagattcagaaccattacctcttcttactacagaggttctcacggtatcatcattgtttacgacgttactgaccaagaatctttcaacggtgttaagatgtggttgcaagaaattgacagatacgctacttccactgttttgaagttgttggttggtaacaagtgtgatttgaaggataagagagttgtcgaatacgatgttgctaaggaattcgctgacgctaacaaaatgccattcttggaaacttctgctttggattctactaatgttgaagatgctttcttgaccatggctagacaaattaaagaatccatgtctcaacaaaacttgaacgaaaccactcaaaagaaggaagacaagggcaacgttaacttaaagggtcaatctttgactaacactggtggtggttgttgttaa

SEQ ID NO: 4386 - DNA, 1128 bp, Artificial Sequence
  Optimized genes for Saccharomyces cerevisiae
atggactctgaagttgctgctttggttatcgacaacggttctggtatgtgtaaggctggttttgctggtgatgatgctccaagagccgttttcccatccattgttggtagaccaagacaccaaggtattatggttggtatgggtcaaaaggactcctacgtcggtgatgaagcccaatctaagagaggtattttaactttgagatacccaattgaacacggtatcgttaccaactgggatgacatggaaaaaatctggcatcacactttttacaatgaattaagagttgcaccagaagaacatccagttttgttgactgaagctccaatgaacccaaagtccaacagagaaaagatgactcaaatcatgtttgaaactttcaacgttccagctttctacgtttctattcaagctgttttgtctttgtattcttctggcagaactactggtatcgtcttggattccggtgacggtgttactcacgttgtcccaatctacgctggtttctccttaccacacgctattttgagaattgatttggccggtagagacttgactgactacttgatgaagattttgtccgaacgtggttactctttctctaccactgctgaaagagaaattgtcagagatatcaaggaaaagttgtgttacgttgccttggacttcgaacaagaaatgcaaaccgccgctcaatcctcttccatcgaaaagtcttacgaattgccagatggtcaagttattaccattggtaacgaaagattcagagctccagaagctttgttccacccatctgttttgggtttggaatccgctggcattgaccaaactacttacaactctatcatgaaatgtgatgtcgatgttagaaaggaattgtacggtaacattgtcatgtctggtggtactaccatgttcccaggtattgctgaaagaatgcaaaaagaaatcaccgctttagctccttcctccatgaaggttaagatcattgccccaccagagagaaagtactccgtctggatcggtggttccatcttggcttccttgaccaccttccaacaaatgtggatttccaagcaagaatacgacgaatctggtccatctattgttcaccacaagtgtttctaa

SEQ ID NO: 4387 - DNA, 765 bp, Artificial Sequence
  Optimized genes for Saccharomyces cerevisiae
atgtctattgctgaatttgcttacaaggaaaagccagaaaccttggttttgttcgatgttgacggtactttgactccagccagattgaccgtttccgaagaagttagaaagactttggccaagttgcgtaacaagtgttgtatcggttttgtcggtggttctgatttgtccaagcaattagaacaattgggtccaaacgtcttggatgaattcgactactctttctctgaaaacggtctaactgcttacagattaggtaaggaattagcttctcaatcctttatcaactggttgggtgaagaaaagtacaacaaattggctgttttcatcttgagatacttgtctgaaattgacttgccaaagagaagaggtaccttcttggaattcagaaatggtatgattaacgtttctccaattggtagaaacgcttccactgaggaaagaaacgaatttgaacgttacgataaagaacaccaaatcagagctaagttcgttgaagctttgaagaaggagttcccagactacggtttgactttctccatcggtggtcaaatttcttttgatgtcttcccagctggttgggacaaaacttactgtttgcaacacgttgagaaggatggtttcaaggaaattcacttcttcggtgacaagaccatggttggtggtaacgattacgaaatcttcgtcgacgaaagaaccattggtcactctgttcaatctccagatgacactgttaagatcttaactgaattgttcaacttgtaa

SEQ ID NO: 4388 - DNA, 765 bp, Artificial Sequence
  Optimized genes for Saccharomyces cerevisiae
atgggtagagttattagaaaccaaagaaagggtgctggttccattttcacttctcacaccagactaagacaaggtgccgctaaattgagaactttggactacgctgaaagacacggttacatcagaggtattgttaagcaaattgtccacgactctggtcgtggtgctccattggccaaggtcgttttcagagacccatacaagtatagattgagagaagaaatcttcatcgctaacgaaggtgttcacactggtcaattcatttacgccggtaaaaaggcctctttgaacgtcggtaatgttttgccattgggttctgttccagaaggtactatcgtttctaacgttgaagaaaagccaggtgacagaggtgctttggctcgtgcttccggtaactacgttatcatcattggtcacaacccagatgaaaacaagactagagtcagattgccatctggcgctaagaaggttatctcttctgatgccagaggtgttattggtgtcattgccggtggtggccgtgttgacaagcctttgttgaaggctggtagagctttccacaagtacagattaaagagaaactcttggccaaagacccgtggcgttgctatgaacccagttgatcatccacatggtggtggtaaccaccaacacatcggtaaggcttctaccatttccagaggtgctgtctctggtcaaaaagctggtttgattgctgctagaagaaccggtttattaagaggctctcaaaagactcaagattaa

SEQ ID NO: 4389 - DNA, 180 bp, Artificial Sequence
  Optimized genes for Saccharomyces cerevisiae
atggctaagtccaagaaccacactgctcacaaccaaaccagaaaggcccacagaaacggtatcaagaagccaaagacttacaagtacccatctttgaagggtgttgacccaaagttcagaagaaatcacaagcacgctttgcacggtactgccaaggctttggctgctgccaagaaataa

SEQ ID NO: 4390 - DNA, 1458 bp, Artificial Sequence
  Optimized genes for Saccharomyces cerevisiae
atggtccatttgggtccaaagaagccacaagctagaaagggttccatggctgacgttccaaaagaattaatggatgaaatccaccaattggaagatatgttcactgtcgactccgaaactttgagaaaggttgtgaagcacttcattgacgaattgaacaaaggtttgaccaagaaaggtggtaacattcctatgattccaggctgggttatggaattcccaactggtaaggaatctggtaactacttggccattgatttaggtggtactaatttgagagttgtcttggtcaagttgagtggtaaccacactttcgacactactcaatccaaatacaagttgccacacgacatgagaaccactaagcatcaagaagaattatggtctttcatcgctgattccttgaaggacttcatggttgaacaagagttgttaaacactaaggatactttaccattaggtttcaccttctcttacccagcttctcaaaacaagatcaacgagggtattttgcaaagatggaccaagggttttgatattccaaacgtcgaaggtcatgatgttgttccattgttgcaaaacgaaatttctaagagagaactaccaattgaaattgttgctttgattaacgatactgttggtactttgattgcttcctactacactgatcctgaaaccaaaatgggtgttatctttggtacaggtgtcaacggtgctttctacgatgtcgtttctgacattgaaaaactagaaggtaagttagctgatgatatcccatctaactccccaatggccatcaactgtgaatacggttcattcgataatgaacacttggttttgcctagaactaagtacgacgttgccgttgatgaacaatctccaagaccaggtcaacaagcctttgaaaagatgacttccggttactatttgggtgaattgctaagattagttttattagaattgaacgaaaagggtttgatgttgaaggaccaagatttgtccaagctaaagcaaccatacatcatggacacttcttatccagccagaatcgaagacgatccattcgaaaacttggaagataccgatgacattttccaaaaagatttcggtgttaagactaccttgccagaaagaaaattgatcagaagattgtgtgagttaatcggtaccagagctgctcgtttggctgtttgtggtatcgccgctatctgtcaaaagagaggttataagaccggtcacattgctgccgatggttctgtttacaacaagtacccaggtttcaaggaagctgctgctaagggtttaagagacatctatggttggactggtgatgcttctaaagacccaatcaccattgtcccagctgaagacggttctggtgctggtgccgctgtcattgccgccttgtctgaaaaaagaattgctgaaggtaaatctttgggtattattggtgcttaa

SEQ ID NO: 4391 - DNA, 2757 bp, Artificial Sequence
  Optimized genes for Saccharomyces cerevisiae
atgactgatacctcttcatcttcttctagctcatccgcttcttctgtttcagctcaccaaccaactcaagaaaagccagctaagacttacgatgatgctgcttccgaatcttccgatgacgatgacattgatgctttgattgaagaattgcaatccaaccacggtgtcgatgatgaagactctgacaacgacggtcctgttgctgccggtgaagccagaccagtcccagaagaatacctacaaacagatccatcttatggtctaacttctgatgaagttttgaaaagaagaaagaagtacggtttaaaccaaatggctgacgaaaaagaatccttagtcgtcaagttcgttatgttcttcgttggtccaattcaatttgtcatggaagcagctgccattttggctgcaggtttgagtgactgggttgactttggtgttatctgtggtttgttaatgttgaacgccggtgttggtttcgtccaagagttccaagctggttccatcgtcgacgaattgaagaagactttggctaacaccgccgtcgtgatcagagatggtcaattagttgaaattccagccaacgaagttgttccaggtgatatcttacagttagaagatggtactgttattccaaccgacggtagaattgtcaccgaagactgtttcttgcaaatcgatcaatctgcaattaccggtgaatcattggccgttgacaagcactacggtgaccaaactttctcttcctctactgtcaagagaggtgaaggttttatggttgtcacagctactggtgacaacacttttgtcggtcgtgctgctgctttggttaacaaggccgctggtggccaaggtcatttcactgaagttttgaacggtattggcattattttgttggtcttagtcatcgctaccttattattggtttggaccgcttgtttttacagaactaacggaattgtcagaatcttgagatacactttgggtatcactatcatcggtgttccagttggtttgccagctgttgttaccactacaatggctgtcggtgctgcttacttagcaaagaaacaagccattgttcaaaagttgtctgctatcgaatctctagctggcgtcgaaatcttgtgttctgataagaccggtacattgaccaagaacaaattgtccttgcacgaaccatacaccgttgaaggtgtctccccagatgatttgatgttgactgcctgtttggccgcctccagaaaaaagaaaggtttagatgccattgacaaagccttcttgaagtctttgaagcaatacccaaaggctaaggacgctttgaccaaatacaaggtcttggaattccatccatttgatcctgtttccaagaaggttactgctgtcgttgaaagtcctgaaggtgaaagaattgtttgtgttaagggtgctccattgtttgttctaaagaccgtggaggaagaccacccaatcccagaagatgttcacgaaaactacgagaacaaggttgccgaattagcctctcgtggtttcagagccttgggtgttgctagaaagagaggtgagggtcactgggaaatcttgggagtcatgccatgtatggacccaccaagagacgacactgctcaaaccgtctctgaagctagacacttgggtttgcgtgttaagatgcttactggtgatgctgtgggtattgccaaggaaacctgtcgtcaattggggttaggtaccaacatctacaacgctgaacgtttgggcttaggtggtggtggtgacatgccaggttccgagttggcagatttcgtcgaaaatgctgatggatttgctgaagtcttcccacaacacaagtacagagttgtggaaattttacaaaacagaggttacttggtcgctatgaccggcgatggtgtcaacgatgcaccatccttgaagaaggctgacaccggtattgctgttgaaggtgccaccgatgcggcaagatctgctgctgatattgttttcttagctccaggcttatctgccatcattgacgctttaaagacatctagacaaattttccacagaatgtactcttacgttgtctaccgtattgcattgtcattgcatttggaaatttttttgggtttgtggattgctattttggataactctttggacatcgacttgatcgtttttattgccatctttgccgatgtcgccactttggctatcgcctacgacaatgccccatattctccaaaaccagttaaatggaacttgccaagattatggggtatgtctatcattctaggtattgttttagctattggttcttggattactttaactaccatgtttttaccaaagggtggtatcatccaaaacttcggtgccatgaacggtatcatgtttttgcagatttctttgactgaaaactggttaattttcatcaccagagctgctggtccattctggtcctccattccttcctggcaattggctggtgctgttttcgctgttgatattattgctactatgttcaccttgttcggttggtggtctgaaaactggactgacattgtcactgttgttagagtctggatctggtctattggtatcttctgtgtcttgggtggtttctactacgaaatgtccaccagtgaagctttcgacagattgatgaatggtaagccaatgaaggagaagaagtccactagatccgttgaggacttcatggccgctatgcaaagagtttctacccaacatgaaaaggaaacttaa

SEQ ID NO: 4392 - DNA, 318 bp, Artificial Sequence
  Optimized genes for Saccharomyces cerevisiae
atggctccagtcaagtctcaagaatccatcaaccaaaagttagctttggttatcaagtctggtaagtacactttgggttacaagtctactgttaagtctttgagacaaggtaagtccaagttgatcatcattgctgctaacactccagttttgagaaagtctgaattggaatactatgctatgttgtctaagaccaaggtttactacttccaaggtggtaacaacgaattaggtactgctgttggtaaattgttcagagtcggtgttgtttctatcttggaagctggtgactctgacattttgactaccttggcttaa

SEQ ID NO: 4393 - DNA, 468 bp, Artificial Sequence
  Optimized genes for Saccharomyces cerevisiae
atgaaggtcgaaattgactctttctctggtgctaagatctacccaggtagaggtactttgttcgttagaggtgattctaagattttcagattccaaaactccaagtctgcttctttattcaagcaaagaaagaacccaagaagaattgcttggactgttttgtttagaaagcaccacaagaagggtattactgaagaagttgccaagaagagatctagaaagactgtcaaggctcaaagaccaatcactggtgcctctttggatttgatcaaggaaagaagatccttgaagccagaagtcagaaaagccaacagagaagaaaaattgaaagctaacaaggagaagaagaaagctgaaaaggctgccagaaaggccgaaaaggctaagtccgctggtacccaatcttccaagttctccaaacaacaagctaaaggtgctttccaaaaggttgctgctacttctcgttaa

SEQ ID NO: 4394 - DNA, 651 bp, Artificial Sequence
  Optimized genes for Saccharomyces cerevisiae
atgaagactttgattgtcgtcgacatgcaaaacgatttcatctccccattgggctctttgactgttccaaagggtgaagaattaatcaacccaatctctgacttgatgcaagatgctgatagagattggcacagaattgttgtcaccagagactggcatccatctagacacatttctttcgctaagaaccacaaggacaaggaaccatactccacctacacttaccactctccaagaccaggtgatgactctactcaagaaggtattttatggccagttcattgtgttaaaaacacttggggttctcaattggttgaccaaatcatggatcaagttgttaccaagcacatcaagatcgttgacaaaggtttcttgaccgacagagaatactactctgctttccatgacatctggaacttccacaaaactgatatgaacaagtacttggaaaagcatcacactgacgaagtctacattgttggtgttgctttggagtactgtgtcaaggccactgctatttccgctgctgaattgggttacaagaccactgtcttgttggactacacccgtccaatttctgatgatccagaagttatcaacaaggttaaggaagaattgaaggctcacaacattaacgtcgttgataaataa

SEQ ID NO: 4395 - DNA, 1533 bp, Artificial Sequence
  Optimized genes for Saccharomyces cerevisiae
atgccaacaagtggtaccactatcgaattgattgacgaccaattcccaaaggatgattctgcctcttctggtattgttgatgaagttgacttgactgaagctaacatcttggctactggtctaaacaagaaggctccaagaatcgttaacggttttggttctttgatgggttcaaaggaaatggtctctgtcgaattcgataagaaaggtaacgaaaagaagtctaacttggacagactattggaaaaggacaaccaagaaaaagaagaagctaagaccaagatccacatctctgaacagccatggaccttgaacaactggcatcaacatttaaactggttgaacatggttttggtctgtggtatgccaatgatcggttggtactttgctttgtccggtaaggttccattacatttgaacgtcttcttgttttccgttttctactacgccgtcggtggtgtttccatcactgccggttatcatagattatggtctcatagatcttactctgctcactggccattgagattgttctatgctatcttcggttgtgcttctgttgaaggttccgctaaatggtggggtcactctcacagaattcatcacagatacactgacactttgagagatccatacgatgccagacgtggtttgtggtattcccacatgggttggatgttgttgaagccaaacccaaagtacaaggctagagctgacattactgacatgactgatgactggactattagattccaacacagacactacattttgttaatgttattgaccgcttttgttattccaactttgatctgtggttacttcttcaacgactacatgggtggcttgatttacgctggtttcatcagagtctttgtcattcaacaagctaccttctgtatcaactctttggctcattatattggtactcaaccattcgacgatagaagaactccaagagacaattggattaccgccattgtcactttcggtgaaggttaccacaacttccaccacgaatttccaaccgattacagaaacgccattaagtggtaccaatacgacccaactaaggtcatcatctacttgacttctttagttggtttagcttacgatttaaagaagttttctcaaaatgctattgaagaagccttgatccaacaagaacaaaagaagattaacaaaaagaaggccaaaatcaactggggtccagttttaactgatttgccaatgtgggacaagcaaacttttttggccaagtccaaggaaaacaagggtttggttattatttctggtatcgtccacgatgtttctggttacatctccgaacacccaggtggtgaaactttaatcaagactgctttgggtaaagatgctaccaaagctttctccggtggtgtctacagacattccaacgctgctcaaaacgttctagctgatatgagagttgctgttatcaaggaatctaagaactccgccatcagaatggcttccaagagaggtgaaatttacgaaaccggtaagttcttttaa

SEQ ID NO: 4396 - DNA, 735 bp, Artificial Sequence
  Optimized genes for Saccharomyces cerevisiae
atggctgctgaaaagattttgactccagaatctcaattgaagaagtccaaggcccaacaaaagactgctgaacaagttgctgctgagagagccgctagaaaagctgcaaacaaggaaaaaagagctatcatcttggaaagaaatgctgcctaccaaaaagaatacgaaaccgctgaaagaaacatcattcaagccaagagagatgctaaggctgctggttcttactacgttgaagctcaacacaagttagttttcgttgttagaatcaagggtatcaacaaaattccaccaaagccaagaaaggttttgcaattattgagattgaccagaattaactccggtactttcgttaaggtcaccaaggctactttggaattgttgaaattgatcgaaccatacgtcgcttacggttacccatcctactctactatcagacaattggtttacaagagaggtttcggtaagatcaacaagcaaagagttccattgtctgacaacgctattattgaagccaacttgggtaaatatggtattttatctattgatgatttgattcacgaaattatcactgttggtccacacttcaaacaagctaacaacttcttgtggccattcaagttgtccaacccatctggtggttggggtgtcccaagaaagttcaagcatttcatccaaggtggttcctttggtaacagagaagaattcattaataaattggtcaagtctatgaactaa

SEQ ID NO: 4397 - DNA, 450 bp, Artificial Sequence
  Optimized genes for Saccharomyces cerevisiae
atgccatctagattcaccaagaccagaaaacatagaggtcacgtttctgcaggtaagggtagaattggtaagcacagaaagcatccaggtggtcgtggtatggctggtggtcaacatcatcacagaatcaacatggacaagtaccacccaggttatttcggtaaggttggtatgagatacttccacaagcaacaagctcacttctggaagccagttttgaacttggacaaattatggactttgatcccagaagataagagagaccaatacttgaagtctgcttctaaggaaactgctccagttattgacactttagctgctggttacggtaagattttgggtaaaggtagaattccaaacgttccagtcattgtcaaggctagatttgtttccaagttggctgaagaaaagatcagagctgccggtggtgttgttgaattgattgcttaa

SEQ ID NO: 4398 - DNA, 765 bp, Artificial Sequence
  Optimized genes for Saccharomyces cerevisiae
atgtctgctccagaagctcaacaacaaaaaagaggtggtttcggtggtagaaacagaggtagaccaaatagacgtggtccaagaaatactgaagaaaagggttgggttccagttaccaagctaggtcgtttggttaaggccggtaagatcactaccattgaagaaattttcttgcactctttgccagtcaaagaattccaaattattgacactttgttgccaggtttgcaagacgaagttatgaacatcaagccagttcaaaagcaaaccagagctggccaaagaacccgtttcaaggctgttgttgtcgttggtgactctaacggtcacgtcggtttaggtattaagactgccaaggaagtcgctggtgctatcagagccggtatcatcattgctaagttgtctgttatcccaattagaagaggttactggggtaccaacttgggtcaacctcactccttggccactaagaccactggtaagtgtggttccgttactgttagattgattccagccccaagaggttctggtattgttgcctccccagctgtcaagaaattgttacaattggctggtgttgaagatgtttacactcaatctaatggtaaaactagaactttggaaaacaccttgaaggctgctttcgttgctattggtaacacttacggttttttgactccaaacttatgggctgaacaaccattacctgtttctccattggatatctactctgatgaagcctctgcccaaaagaagagattctaa

SEQ ID NO: 4399 - DNA, 1131 bp, Artificial Sequence
  Optimized genes for Saccharomyces cerevisiae
atgtctacttttggtaaattgttcagagtcaccacttatggtgaatctcattgtaagtctgtcggttgtatcgtcgacggtgtcccaccaggtatgtccttgactgaagctgatattcaaccacaattgaccagaagaagacctggtcaatccaagttgtccactcctcgtgatgaaaaggacagagtcgaaatccaatctggtaccgaattcggtaagactttgggtactccaattgccatgatgattaagaacgaagaccaaagaccacatgactactccgacatggacaaattcccaagaccatctcatgctgacttcacctactctgaaaagtacggtatcaaggcctcttctggcggtggtagagcttccgccagagaaactattggtagagttgccagtggtgctattgctgaaaagttcttggctcaaaactccaacgttgaaattgtcgctttcgttactcaaatcggtgagatcaagatgaacagagactctttcgacccagaatttcaacatttgttgaacactatcactagagaaaaggttgactccatgggtccaatcagatgtccagatgcctccgtcgctggtttgatggttaaggaaattgaaaaatacagaggtaacaaggattccattggtggtgttgtcacttgtgtcgttagaaacttgccaactggtttaggtgaaccatgtttcgacaagttggaagccatgttggctcacgctatgttatctattccagcttctaagggttttgaaatcggttccggtttccaaggtgtttctgttccaggttctaagcacaacgatccattctactttgagaaagaaaccaatagattgagaaccaagaccaacaactctggtggtgttcaaggtggtatctctaacggtgaaaacatctacttctccgttcctttcaagtccgttgctaccatttctcaagaacaaaaaaccgctacttacgatggtgaagaaggtattttggctgctaagggcagacacgatcctgctgttaccccaagagccattcctattgttgaagctatgactgctttggttttggccgatgctttattgattcaaaaggctagagatttctctagatctgttgttcattaa

SEQ ID NO: 4400 - DNA, 360 bp, Artificial Sequence
  Optimized genes for Saccharomyces cerevisiae
atgccaaaaaagcgtgcttctaacggtagaaataagaagggtagaggtcacgttaagccagttagatgtgtcaactgttccaagtctattccaaaggacaaggctatcaagagaatggctatcagaaacattgttgaagctgccgctgttagagatttgtctgaagcctctgtttacccagaatacgctttgccaaagacttacaacaagttgcactactgtgtttcctgtgctattcacgctagaattgtcagagttagatctagagaagacagaaagaacagagctccaccacaaagaccaagattcaaccgtgaaaacaaggtttctccagctgatgctgctaagaaggccttataa

SEQ ID NO: 4401 - DNA, 612 bp, Artificial Sequence
  Optimized genes for Saccharomyces cerevisiae
atggcttctttcgctaccaagttcgttattgcttgttttttgtttttctctgcctccgctcacaacgttttgttgccagcttacggtagaagatgtttctttgaagatttgtccaagggtgatgaattgtccatctcttttcaattcggtgacagaaacccacaatcctcttctcaattaactggtgacttcatcatctatggtccagaaagacacgaagtcttgaagactgtcagagacacttctcatggtgaaattaccttgagtgctccatacaagggtcacttccaatactgtttcttgaacgaaaacaccggtattgaaactaaggatgttactttcaacattcacggtgttgtttacgttgacttggatgacccaaacactaacactttggactctgctgttagaaagttgtctaaattgaccagagaagttaaggacgaacaatcttacattgtcatcagagaaagaactcacagaaatactgctgaatctaccaacgatagagttaaatggtggtctattttccaattgggtgtcgttatcgctaactccttgttccaaatctactacttgagaagattcttcgaagttacctctttggtttaa

SEQ ID NO: 4402 - DNA, 264 bp, Artificial Sequence
  Optimized genes for Saccharomyces cerevisiae
atggtttcccaattatttgaagaaaaggccaaggctgttaacgaattgccaaccaagccatctactgatgaattgttggaattatacgctttgtacaagcaagctactgttggtgacaacgacaaggaaaaaccaggtattttcaacatgaaggacagatacaaatgggaagcttgggaaaacttgaagggtaagtctcaagaagatgctgaaaaggaatacattgccttggttgaccaattgattgctaagtactcttcttaa

SEQ ID NO: 4403 - DNA, 930 bp, Artificial Sequence
  Optimized genes for Saccharomyces cerevisiae
atgtctgctgttttcaacaacgctactttatctggtttggttcaagcttccacttactctcaaaccttgcaaaacgttgctcactaccaacctcaattgaacttcatggaaaaatactgggccgcttggtactcctacatgaacaacgatgtcttggctaccggtttgatgttcttcttgttacacgaatttatgtattttttcagatgtttgccatggttcatcattgaccaaattccatacttcagaagatggaagctacaaccaaccaagatcccatccgctaaggaacaattatactgtttgaaatctgttttgttgtctcatttcttagtcgaagctattccaatttggactttccatccaatgtgtgaaaagttgggtattaccgttgaagttccatttccatctttgaagactatggctttggaaattggtttattctttgttttagaagacacctggcattattgggctcatagattgttccactacggtgtcttctacaagtacattcacaagcaacatcacagatatgctgctccattcggcttgtccgccgaatacgctcacccagctgaaactctatccttaggtttcggtactgttggtatgccaatcttgtacgttatgtacactggtaagttacatttgttcactttgtgtgtctggattactttgagattattccaagccgttgactctcactccggttacgatttcccatggtctttaaacaagattatgccattctgggctggtgctgaacaccacgatttgcaccatcattactttatcggtaactacgcctcttctttccgttggtgggactactgcttggacactgaatctggtccagaagccaaggcttctagagaagaaagaatgaagaagagagctgaaaacaatgctcaaaagaagaccaactaa

SEQ ID NO: 4404 - DNA, 525 bp, Artificial Sequence
  Optimized genes for Saccharomyces cerevisiae
atgtctactaaggctcaaaacccaatgagagacttgaagattgaaaagttggttttgaacatttctgtcggtgaatctggtgacagattgactagagcttccaaggttttagaacaattatccggtcaaactccagttcaatctaaggccagatacactgtcagaactttcggtatcagaagaaacgaaaaaattgctgttcacgttactgttagaggtccaaaggctgaagaaattttggaaagaggtttgaaggtcaaggaataccaattgagagatagaaacttctctgctactggtaactttggtttcggtattgacgaacacattgatttgggtatcaagtatgacccatctattggtattttcggtatggacttctacgttgttatgaacagaccaggtgctagagttaccagaagaaagagatgtaagggtactgttggtaactcccacaagactaccaaggaagacaccgtttcttggttcaagcaaaagtacgatgctgatgtcttggacaaataa

SEQ ID NO: 4405 - DNA, 438 bp, Artificial Sequence
  Optimized genes for Saccharomyces cerevisiae
atgggtaagggtaaaccaagaggtttgaactccgctagaaagttgagagtccacagaagaaacaacagatgggctgaaaacaactacaagaagagattgttaggtactgctttcaagtcttctccatttggtggttcttcccacgccaagggtatcgttttggaaaaattgggtattgaatccaagcaaccaaattctgctatcagaaagtgtgtcagagttcaattgatcaagaacggtaagaaggtcactgcctttgttccaaacgatggttgtttgaacttcgttgacgaaaatgatgaagttttattagctggtttcggtagaaaaggtaaggctaagggtgacattccaggtgttagattcaaagttgtcaaggtttctggtgtctctttgttggctttgtggaaggaaaagaaagaaaagccaagatcttaa

SEQ ID NO: 4406 - DNA, 468 bp, Artificial Sequence
  Optimized genes for Saccharomyces cerevisiae
atgaaggttgaagttgactctttctctggtgctaagatttacccaggtagaggtactttgttcgttagaggtgactccaagatcttcagattccaaaactccaagtctgcttctttattcaagcaaagaaagaacccaagaagaattgcttggactgttttgtttagaaagcaccacaagaagggtatcactgaagaagttgccaagaaaagatccagaaagactgtcaaggctcaaagaccaattactggtgcctccttggatttgatcaaggaaagaagatctttgaagccagaagtcagaaaagccaacagagaagaaaaattgaaagctaacaaggagaagaagagagctgaaaaggctgccagaaaggctgaaaaggccaagtccgctggtgttcaaggttctaaggtctctaaacaacaagctaaaggtgctttccaaaaggttgctgctacttctcgttaa

SEQ ID NO: 4407 - DNA, 1038 bp, Artificial Sequence
  Optimized genes for Saccharomyces cerevisiae
atggaggctcacaaccaattcttgaagacttttcaaaaggaaagacacgacatgaaggaagctgaaaaggatgaaattttgttgatggaaaactccagaagattcgttatgttcccaatcaagtaccacgaaatctgggctgcatacaagaaggttgaagcctctttctggactgccgaagaaattgaattggctaaggacaccgaagatttccaaaagttgactgatgaccaaaagacctacattggtaatttgctagctttgtctatctcttctgacaacttggtcaacaagtacttgattgaaaacttttccgctcaattgcaaaaccctgaaggtaaatccttctacggtttccaaattatgatggaaaatatctactctgaagtttactctatgatggttgatgctttcttcaaggacccaaagaacattccattgttcaaagaaattgccaacttaccagaagtcaagcacaaggctgctttcatcgagagatggatttccaacgacgactccttgtacgctgaaagattggttgcctttgctgccaaggaaggtattttccaagctggtaactacgcctccatgttttggttgaccgacaagaagatcatgccaggtttggctatggctaacagaaacatctgtagagacagaggtgcttacactgacttttcttgtttgttattcgctcatttgagaaccaagccaaacccaaagattattgaaaaaatcatcactgaagctgtcgaaatcgaaaaggaatactattctaactctttgccagttgaaaagttcggtatggacttgaaatctattcacacttacatcgaatttgttgctgatggtttattacaaggttttggtaacgaaaaatactacaacgctgttaacccattcgaattcatggaagacgtcgccactgctggtaagaccactttctttgaaaagaaagtttccgactaccaaaaagcttctgatatgtctaagtctgctactccatccaaggagatcaacttcgatgatgacttctaa

SEQ ID NO: 4408 - DNA, 201 bp, Artificial Sequence
  Optimized genes for Saccharomyces cerevisiae
atgtctttctcttctttgtacaagactttcttcaagagaaacgctgtctttgttggtaccattttcgccggtgctttcgtcttccaaactgttttcgacactgctatcacttcttggtacgaaaaccacaacaagggtaagttgtggaaggatgtcaaggctagaattgctgctggtgatggtgacgatgatgacgaataa

SEQ ID NO: 4409 - DNA, 999 bp, Artificial Sequence
  Optimized genes for Saccharomyces cerevisiae
atggttagagtcgctatcaacggtttcggtagaattggtagattggttatgagaatcgctttgtccagaccaaacgttgaagtcgttgccttaaacgacccattcatcaccaacgattacgccgcttacatgttcaaatacgattctactcacggtcgttacgctggtgaagtttcccacgatgacaagcacattattgttgatggtaagaaaattgctacttaccaagaaagagatccagctaacttgccatggggttcttccaacgtcgacattgccattgattccactggtgttttcaaggagttggacaccgctcaaaagcatattgacgccggtgccaagaaggttgtcatcactgctccatcctccaccgccccaatgtttgtcatgggtgtcaatgaagaaaagtacacctctgacttaaagattgtctctaacgcttcttgtaccactaactgtttggctccattggccaaagttatcaatgatgcctttggtattgaagaaggtttgatgactaccgttcattctttgactgccactcaaaagactgttgacggtccaagtcacaaggactggagaggtggtagaactgcttccggtaacatcattccatctagtaccggtgctgccaaggctgtcggtaaggttttgccagaattgcaaggtaagctaactggtatggctttcagagttccaactgtcgatgtttctgttgttgacttgaccgtcaagttgaacaaggaaactacttatgatgaaatcaagaaggtcgtcaaagctgctgctgaaggtaaattgaagggtgttttaggttacactgaagatgctgttgtttcctctgatttcttgggtgactctcactcttctattttcgacgcttctgctggtatccaattgtctccaaagttcgttaagttagtctcctggtacgacaacgaatacggttactctaccagagtggtggatttggtcgaacacgttgctaaggcttaa

SEQ ID NO: 4410 - DNA, 2841 bp, Artificial Sequence
  Optimized genes for Saccharomyces cerevisiae
atggctggtcaagttttggatggtaaagcttgtgctcaacaattcagatccaacattgctaatgaaatcaagtctattcaaggtcacgttccaggctttgctccaaacttagccatcatccaagttggtaacagaccagactctgctacctacgttcgtatgaagagaaaggctgctgaagaggctggtattgttgccaacttcattcacttagatgaatctgccaccgagtttgaagtcttgagatacgtcgaccaattaaacgaagacccacacacccatggtattattgtccaattgccattgcctgctcacttggacgaagatagaattacttccagagttttggcagaaaaggacgtcgatggtttcggtcctactaatattggtgagttgaacaagaagaacggtcatccatttttcttgccatgtaccccaaaaggtatcattgaattactacacaaggctaacgttactattgaaggttctcgttccgttgttatcggtcgttctgacatcgtcggttcccctgttgctgaattgttgaaatctttgaactccactgtgactatcactcactctaagacccgtgatattgcatcttacttgcacgacgccgatattgtcgtcgttgctattggccaaccagaatttgttaagggtgaatggttcaagccaagagacggcacttcttccgacaagaagaccgttgttatcgatgtcggtaccaactacgttgctgatccatctaaaaagtctggtttcaaatgtgttggtgacgttgaatttaacgaagctatcaaatatgtccacttgatcacacccgttccaggtggtgttggacctatgactgtcgctatgttaatgcaaaacactttaattgctgctaaaagacaaatggaagaatcctccaagccattgcaaattccaccactaccattaaagttattaactccagttccttctgatattgacatttctagagctcaacaaccaaagttgattaatcaattggctcaagaactgggtatctactctcatgaattggaactatacggtcactacaaggccaagatctctccaaaggttattgagagattacaaactagacaaaatggtaagtacattttagtttccggtattaccccaacaccattgggcgaaggtaagtccaccactactatgggtttggttcaagccctaactgctcatttgggtaagccagctattgccaacgtcagacagccatctttaggtccaactttgggtgtcaaaggtggtgcagctggtggtggttattctcaagtcattccaatggacgaattcaacttgcatttaacaggtgatatccatgctattggtgctgctaacaacttgttagctgctgccattgataccagaatgttccacgaaactacccaaaagaatgacgctactttctacaaccgtttggtaccaagaaaaaacggtaagagaaagttcactccatccatgcagagaagattaaatagattgggtatccaaaaaactaacccagacgatttgacccctgaagaaattaacaaattcgccagattgaatatcgatcctgacactataaccatcaagcgtgttgttgacatcaacgatagaatgttgcgtcaaatcaccattggtcaagctccaaccgaaaagaaccacactcgtgtcaccggtttcgatatcactgttgcttctgaattgatggctatcttggctttgtccaaggatttaagagacatgaaagaaagaatcggtagagttgtcgttgccgctgatgttaacagatctccagtcactgttgaagatgttggttgtactggtgctttgactgccttgttgagagatgccattaaaccaaatttgatgcaaacattggaaggtactcctgtattggttcacgctggtccattcgctaacatttccatcggtgcttcctctgttattgctgacagagtcgcattgaagttggtgggtactgaaccagaagccaagactgaagcaggttacgtggttactgaagctgggttcgacttcaccatgggtggtgaaagattcttcaacatcaagtgtcgttccagtggtttgactccaaacgctgttgtcttggtcgctacagttagagccttaaaatcccacggtggtgccccagatgtcaagcctggtcaacctttaccatccgcttacactgaagaaaacatcgaattcgttgagaagggcgctgcaaacatgtgtaagcaaattgccaatattaagcaatttggtgtcccagttgtcgttgcaatcaacaagtttgaaaccgacaccgagggtgaaatcgccgctatcagaaaggctgctttagaagctggtgctttcgaagctgttacctctaaccattgggctgaaggtggcaagggtgccattgacttggctaaggctgtcatcgaggcctccaaccaaccagtggatttccatttcttatacgatgtcaactcttctgtcgaagacaaattgaccaccattgttcaaaagatgtacggcggtgctgccatcgacattttgccagaagcccaaagaaagattgatatgtataaggaacaaggtttcggtaaccttccaatctgtatcgctaagactcaatactccttgtctcacgatgctactttgaagggtgttccaactggttttaccttcccaattagagatgttagactatccaatggtgccggttatttgtacgctttggccgccgaaattcaaaccatcccaggtctagccacttacgccggttacatggccgtcgaagttgatgatgacggtgaaattgacggtttattctaa

SEQ ID NO: 4411 - DNA, 759 bp, Artificial Sequence
  Optimized genes for Saccharomyces cerevisiae
atgtctttgccagctaccttcgatttgacccctgaagatgctcaattgttgttggccgctaacactcacttgggtgctagaaacgttcaagtccaccaagaaccatacgttttcaacgccagaccagatggtgttcacgttatcaacgttggtaagacctgggaaaagttggttttggctgctagaattattgctgccattccaaacccagaagacgttgttgctatctcttctagaactttcggtcaaagagctgtcttgaagttcgctgctcacactggtgccaccccaattgccggtagattcactccaggttctttcaccaactacattaccagatccttcaaggagccaagattagtcattgttaccgatccaagatctgatgcccaagccatcaaggaagcttcttacgtcaacatcccagttattgctttgactgacttggactctccatctgaattcgttgatgtcgctattccatgtaacaacagaggtaagcactctattggtttgatctggtacttgttagcaagagaagtcttaagattgagaggtgctttagttgacagaacccaaccatggtctatcatgccagacttgtacttctacagagacccagaagaagttgaacaacaagttgccgaagaagccactaccgaagaagctggtgaagaggaagctaaggaagaagttactgaagaacaagctgaagctactgaatgggctgaagaaaacgctgacaacgtcgaatggtga

SEQ ID NO: 4412 - DNA, 1314 bp, Artificial Sequence
  Optimized genes for Saccharomyces cerevisiae
atggctgtctccaaggtctacgctagatctgtttatgactctagaggtaacccaactgttgaagtcgaattgactactgaaaagggtgttttcagatccatcgttccatccggtgcttctactggcgtccacgaagctttggaaatgagagatggtgacaaatctaagtggatgggtaaaggtgtcttgcacgctgtcaaaaatgtcaacgatgttattgctcctgctttcgttaaggcaaacattgacgtcaaggaccaaaaggccgttgatgacttcttgatttctttagacggtaccgctaacaagtctaaattgggtgccaacgctattttgggtgtctctttggctgcttccagagctgctgccgccgaaaaaaacgtcccattgtacaagcacttggcagacttgtccaagtctaagacttctccatacgttttgccagttccatttttgaacgttttaaacggtggttctcacgccggtggtgccttggctttgcaagaattcatgattgccccaaccggtgctaagacctttgctgaagccttgagaatcggttcagaagtttaccacaacttgaaatccttgaccaagaagagatacggtgcatctgctggtaatgtcggtgatgaaggtggtgttgctccaaatattcaaactgctgaagaagcattagatttaattgttgacgctatcaaagctgctggtcacgacggtaagatcaagattggtttggactgtgcctcttccgaatttttcaaggatggtaagtacgatttggatttcaagaatccaaactctgacaagtccaaatggttaacaggtccacaattagctgatttgtatcactctttgatgaagcgttacccaattgtttctatcgaagacccattcgctgaagatgattgggaagcttggtctcatttcttcaaaactgcaggtatccaaattgtcgctgacgacttaaccgttaccaacccaaagagaattgctactgccattgaaaagaaggctgccgatgctttgttattgaaggttaaccaaatcggtactttgtctgaatctatcaaggctgctcaagattctttcgccgctggttggggtgttatggtttcccacagatctggtgaaaccgaagacactttcatcgctgacttggttgttggtttaagaactggtcaaattaagactggtgctccagctcgttctgaaagattggccaagttgaaccaattgttgagaattgaagaagaattaggtgataatgctgtttttgccggtgaaaacttccaccacggtgacaagttataa

SEQ ID NO: 4413 - DNA, 1161 bp, Artificial Sequence
  Optimized genes for Saccharomyces cerevisiae
atgagattatctaacttgattgcttccgcctctttgttgtccgcagctactttggccgccccagctaaccacgaacacaaggacaagagagctgtcgttactaccactgttcaaaagcaaactaccattattgttaacggtgctgcttctactcctgttgccgctttggaagaaaacgctgtcgttaactccgctccagctgccgctacttctaccacctcctctgctgcttccgttgctaccgctgctgcttcttcctccgaaaacaactctcaagtttccgctgctgcatctccagccagctccagcgctgccacttccactcaatcttcttcatcatcccaagcctcctcttcctcttctagcggtgaagatgtttcatctttcgcttcaggtgttagaggtattacttacactccatacgaatcttctggtgcttgtaagtccgcctctgaagttgcttctgatttggctcaattgactgatttcccagtcatcagattgtacggtactgactgtaaccaagtcgaaaatgttttcaaggctaaggcatccaaccaaaaggtttttttgggtatctactacgttgaccaaatccaagatggtgtcaacactatcaagtctgctgtggaatcctacggttcttgggatgatgtcactactgtctccattggtaacgagttggtcaatggtaatcaagctaccccatctcaagttggtcaatacattgactccggtagatctgccttgaaggccgctggttacaccggtccagttgtctctgttgatacttttattgccgttattaacaacccagaattgtgtgattactctgactacatggctgttaatgctcacgcttacttcgacaaaaacaccgtcgcccaagactctggtaaatggttgttagaacaaattcaaagagtctggactgcctgtgacggtaagaagaacgttgttatcactgaaagtggttggccatctaagggtgaaacctacggtgtcgctgttccatccaaggaaaaccaaaaagatgctgtttctgctattacctcttcttgtggtgctgacactttcttgttcactgctttcaacgattattggaaggctgatggtgcctatggtgttgaaaagtactggggtattttgtctaacgaataa

SEQ ID NO: 4414 - DNA, 942 bp, Artificial Sequence
  Optimized genes for Saccharomyces cerevisiae
atgagattctctaccactttggccaccgctgccactgccttgttcttcaccgcctctcaagtttctgctattggtgaattggctttcaacttaggtgtcaagaacaacgacggtacttgtaagtccactagtgactacgaaactgaattacaagctttgaaatcttacacttccaccgttaaggtttacgccgcctccgactgtaacaccttgcaaaacttgggtccagctgctgaggctgaaggttttaccattttcgtcggtgtctggccaactgacgattctcactacgctgctgaaaaggctgcattgcaaacctacttgccaaagatcaaggaatctactgtcgctggtttcttggtcggctctgaagctttgtacagaaacgatttgactgcttcccaattgtctgacaagattaatgatgtcagatctgttgttgctgacatttctgactctgatggtaagtcttactccggtaaacaagttggtactgttgactcctggaacgtcttggttgccggttacaactccgctgttattgaagctagtgattttgttatggctaacgctttttcatactggcaaggtcaaactatgcaaaatgcttcttattctttctttgatgacatcatgcaagccctacaagtcattcaatctaccaagggttctactgatatcactttctgggttggtgaaaccggttggccaaccgatggtaccaacttcgaatcctcctacccatctgtcgacaacgccaagcaattctggaaagaaggtatctgttccatgagagcttggggtgttaacgttatcgtttttgaagccttcgatgaagactggaagccaaacacttctggtacctccgatgttgaaaagcactggggtgttttcacttcctctgataacttgaagtactctttggactgtgatttctcctaa

SEQ ID NO: 4415 - DNA, 366 bp, Artificial Sequence
  Optimized genes for Saccharomyces cerevisiae
atgtctgatttccaaaaggaaaaggtcgaagaacaagaacagcaacaacaacaaatcatcaagatcagaatcactttgacttctactaaggtcaagcaattggaaaacgtttcttccaacattgtcaagaacgctgaacaacacaacttggttaagaagggtccagtcagattgccaaccaaggttttgaagatttctaccagaaagactccaaacggtgaaggttccaagacctgggaaacttacgaaatgagaattcacaagagatacattgacttggaagctccagttcaaattgttaagcgtattactcaaatcaccattgaaccaggtgttgatgttgaagttgtcgttgcttctaactaa

SEQ ID NO: 4416 - DNA, 771 bp, Artificial Sequence
  Optimized genes for Saccharomyces cerevisiae
atggctccaggtaagaaggttgctccagccccatttggtgctaagtctaccaagtccaacaagaccagaaacccattgactcactctactccaaaaaacttcggtattggtcaagctgtccaaccaaagcgtaacttgtccagatacgtcaaatggccagaatacgttagagttcaaagacaaaaaaagatcttgtctatcagattgaaggtcccaccaaccattgctcaattccaatacactttggacagaaacactgctgctgaaactttcaagttgttcaacaaatacagaccagaaaccgctgccgaaaagaaagaaagattaactaaggaagctgctgccgtcgctgaaggtaaatccaagcaagatgcttctccaaagccatacgctgtcaagtacggtttgaaccacgttgttgccttgattgaaaacaagaaggccaagttagttttgatcgctaacgatgttgacccaatcgaattggtcgttttcttgccagctttgtgtaagaagatgggtgttccatatgctattgttaagggtaaggctagattgggtactctagttaaccaaaagacttctgctgttgctgctttaactgaagttcgtgctgaagacgaagccgctttggctaaattggtttccactattgatgccaactttgctgataagtacgatgaagtcaagaagcactggggtggtggtatcttaggtaacaaggctcaagccaaaatggacaagagagctaagaactctgactccgcttaa

SEQ ID NO: 4417 - DNA, 1593 bp, Artificial Sequence
  Optimized genes for Saccharomyces cerevisiae
atgtctgctactaagtctattgttggtgaagccttagaatacgttaacatcggtttgtctcatttcttggcattgcctttggcccaaagaatttccttgattattatcatcccattcatttacaacattgtctggcaattgctatattctttgagaaaggacagaccaccattggttttctactggattccatgggttggttctgctgttgtttacggtatgaagccatatgaattcttcgaagaatgtcaaaaaaaatacggtgacattttctctttcgtcctattgggtagagtcatgaccgtctacttgggcccaaagggtcacgaatttgtcttcaacgccaagttggctgatgtctccgccgaagctgcttacgctcacttaactactccagtttttggcaaaggtgttatctacgactgtccaaactctagattgatggaacaaaagaagttcgttaagggcgctttgaccaaggaagctttcaagtcctatgttccattaattgctgaagaagtctataagtacttcagagattccaagaacttcagattaaacgaaagaaccactggtaccattgatgttatggtcactcaaccagaaatgactatcttcactgcttccagatctttattgggtaaagaaatgagagctaaattggacactgattttgcttatttatactctgatttagacaagggtttcaccccaatcaactttgttttcccaaatttgccattggaacattacagaaaaagagaccacgctcaaaaggctatttctggtacttacatgtctctaattaaggaaagaagaaagaacaacgatattcaagatagagacttgattgactccttgatgaagaattctacctacaaggatggtgtcaagatgactgaccaagaaattgccaacttgttgatcggcgttttaatgggtggtcaacacacttctgccgctacctctgcttggatcttgttacatttggctgaacgtccagacgttcaacaagaattgtacgaagagcaaatgagagttctagacggtggtaagaaggagttgacttacgatttgttgcaagagatgccacttttgaaccaaaccatcaaggaaactttaagaatgcatcatccattgcactctttgtttagaaaggttatgaaagacatgcacgtcccaaacacttcctacgtcattcctgctggttaccacgttttggtctctccaggttacactcacttgagagatgaatatttcccaaatgctcatcaattcaatattcacagatggaacaaggactctgcttcttcttactccgtcggtgaagaagttgactatggttttggtgctatctctaagggtgtttcttccccatacttacctttcggtggtggcagacacagatgtattggtgaacacttcgcttactgtcaattaggtgtcttgatgtccatcttcatcagaactttgaagtggcactacccagaaggtaagactgttccacctccagatttcacatccatggttaccttgccaaccggtccagctaagatcatttgggaaaagagaaacccagaacaaaagatttaa

SEQ ID NO: 4418 - DNA, 1392 bp, Artificial Sequence
  Optimized genes for Saccharomyces cerevisiae
atgtctgatggtactcaaaaattatggggtggtcgtttcaccggtgaaaccgacccattgatgcacttgtacaacgcttctttgccatacgattacaaaatgtacaaggctgatttggaaggtaccaaggtttacaccgccggcttacaaaagttgggtctattgactgaaaccgaattagccaagatccacgaaggtttggctgaaatcaagaaggaatgggatgccgataagttcgttagacatccaaacgatgaagatattcacactgccaacgaaagaagattgggtgagttgatcggtagagacattgctggtaaggtccacaccggcagatctagaaacgaccaagttgttactgacttaagaatttactgtagagatatcgttaacgacactttgttcccagctttgaagggtttagtggaagtcttgattaagagagccgaaggtgaaattgatgttttaatgccaggttacactcatttgcaaagagctcaaccaatcagatggtctcactggttatcttcttacgctacttacttcactgaagactataagcgtttgggccaaatcttgcacagattgaaccaatctccattaggtgctggtgccttggccggtcacccatacggtattgacagagaattcttggctgaaggcctaggtttcaactccgttattggtaactctttggttgctgtctccgatagagatttcattgttgaattgatgttctggggtacacttttcatgaaccacatctctagatttgctgaagatttaatcatctactgtaccgcagaatttggtttcatccaattgtctgacgcttactctactggttcttccttgatgccacaaaagaagaacgccgactctttagaattgttgagaggtaaatccggtagagttttcggtgacttgacaggttttttgatgtccttaaaaggtattccatctacctacgacaaggacatgcaagaagacaaagaaccattgtttgactgtttgaccactgttgaacactccatgcttatcgctactggtgtcatttccactttgactgtcaacaaggaaaagatggaagctgctttaaccatggatatgttggccactgatttggctgactacttggtcagaaagggtgttccattcagagaaactcaccacatttctggtgaatgtgttgccaccgctgaaagattaggtttgtccggtatcgataaattgaccttggaacaataccaaaagattgactccagattcggtcaagatttattcgaaactttcaactttgaacaatccgtcgaacgtcgtgatgctaccggtggtactgctaagtctgctgttttgaagcaattggacaacttgaaatctcaattaaactaa

SEQ ID NO: 4419 - DNA, 249 bp, Artificial Sequence
  Optimized genes for Saccharomyces cerevisiae
atggttttggttcaagatttgttgcatccaactgctgcttccgaagctagaaagcacaagttgaagactttggtccaaggtccaagatcttacttcttggatgtcaagtgtccaggttgtttgaacattaccactgttttctctcacgctcaaaccgctgttacttgtgaatcttgttctactgtcttgtgtaccccaaccggtggtaaggctaaattgtctgaaggtacttctttcagaagaaaataa

SEQ ID NO: 4420 - DNA, 186 bp, Artificial Sequence
  Optimized genes for Saccharomyces cerevisiae
atgttctctgaattgatcaacttccaaaacgaaggtcacgaatgtcaatgtcaatgtggttcttgtaagaacaacgaacaatgtcaaaagtcttgttcctgcccaactggttgtaactctgatgacaagtgtccatgtggtaacaagtccgaagaaaccaagaagtcatgttgttctggtaaataa

SEQ ID NO: 4421 - DNA, 978 bp, Artificial Sequence
  Optimized genes for Saccharomyces cerevisiae
atgaagttcaacttctctaccattttcaacattttgttcttcttgttcactttgatcgaagctaactccaacggtgaaactgtcaagttgattacctctgacggtattgtttactcttatgctgtttacaccaagaccttggctccagctagagttgtcgttaagactatctcttacactaccaccagagtctacccaattactttagccaactccgttgtttcatcaactaccgaaaagatcactgaagtttctactgtttctgcttccgaacaagtttctgccacccaaaccaattctttggtttccacctcaaccgtctctaccatttctccaactatttcctccggttcctctacgtcctcttcttctacttacgacattgaatcctcccaatctattgaatcttctggtacttcttccgctactgctgaaccatctgcttctagtggtttcagattgacttcttccagtgctttcgtttccagtaccgctccattctccagtcaattatcttcctcttcttcttctgaaaccagttcttcttcattcagcacttcttcctcttctgcaccattatccttgactagttcctcatccagcagctcatctttcgctaccatcatcactttggccccaagtagctccaagtctggtaactctcaattgacactagcctcttcttcctccacctccgccgttgaaagttcgcaaactggttctacaattgccagaactacatctaccttagttccatcctcttctgttgacaccacttccagagctactacttccatgccattggaatcttcttccactcaatccatctccgtctccagctctgatggtacctgttacgttttctacgatgatgacgactactactccactgtatacttgaccaacccatctcaaagtgttgatgctgctacaaccatcacctctactaacactatctacgctaccgttactatttaa

SEQ ID NO: 4422 - DNA, 390 bp, Artificial Sequence
  Optimized genes for Saccharomyces cerevisiae
atgtctacttcttctgtcagattcgctttcagaagattttggcaatctgaaactggtccaaagactgttcacttctgggctccaactttgaagtggggtttggttttcgccggtttctctgacatgaagagaccagttgaaaagatctccggtgctcaaaacttgtctttgttatctaccgctttgatctggactagatggtctttcgttatcaagccaagaaacattttgttggcttctgttaactccttcttgtgtttgactgctggttaccaattgggtagaattgctaactacagaatcagaaacggtgactctatttctcaattatgttcttacatcttgtctggtgctgatgaatccaagaaggaaattactaccggtcgttaa

SEQ ID NO: 4423 - DNA, 1314 bp, Artificial Sequence
  Optimized genes for Saccharomyces cerevisiae
atggctgtctccaaggtttacgctcgttctgtctacgactctagaggtaaccctactgttgaagttgaattaactaccgaaaagggtgttttcagatctattgttccatctggtgcttccaccggtgtccacgaagccttggaaatgagagacgaagacaaatctaaatggatgggtaaaggtgtcatgaacgctgtcaacaacgttaacaatgttattgctgcagctttcgttaaagctaatttggatgttaaggaccaaaaggccgttgacgattttttgttatccttggacggtaccgccaacaagtccaaattgggtgccaatgctattttgggcgtttccatggccgctgccagagctgctgctgctgaaaaaaatgtcccattgtaccaacacttggctgacttgtccaaatccaagacttctccatacgttttgccagttccattcttgaacgtcttgaacggtggttcccacgctggcggtgctttagctttgcaagaattcatgattgccccaactggtgccaagaccttcgctgaagctatgcgtattggttctgaagtctatcacaacttgaaatcattaaccaagaagagatacggtgcttctgctggtaacgttggcgatgaaggtggtgttgctccaaacatccaaactgccgaagaagcattagacttgattgttgatgccatcaaggctgccggtcacgatggtaaggtcaagatcggtttggactgtgcctcttccgaatttttcaaggatggtaagtacgatttagatttcaagaacccagaatctgacaagtctaagtggttgaccggtgtcgaactagctgacatgtaccactctttgatgaagcgttacccaattgtctctatcgaagacccatttgctgaagatgactgggaagcttggtctcatttcttcaaaactgctggtattcaaatcgtcgctgatgatttgactgtcaccaacccagctagaattgctactgccattgaaaagaaagccgctgatgctttgctattgaaggttaatcaaattggtactttgtctgaatccattaaggctgctcaagattctttcgccgctaactggggtgttatggtttctcacagatccggtgaaactgaagatactttcatcgccgatttggttgttggtttaagaactggtcaaatcaagacaggtgctccagccagatcagaaagattggctaagttaaaccaattgttgagaatcgaggaagaattgggtgacaaggctgtttatgctggtgaaaacttccaccacggtgataagttgtaa

SEQ ID NO: 4424 - DNA, 1470 bp, Artificial Sequence
  Optimized genes for Saccharomyces cerevisiae
atgtctgctgatttcggtttaatcggtttggccgttatgggtcaaaacttgattttgaatgctgccgatcatggtttcaccgtttgtgcctacaacagaactcaatctaaagttgaccacttcttggctaacgaagccaagggtaaatctattattggtgccacttctatcgaagacttcatctccaaattgaagagaccaagaaaggtcatgttgttggtgaaggctggtgctccagtcgatgctcttatcaaccaaattgtcccattattagaaaaaggtgatatcattattgatggtggtaactctcatttcccagactctaacagaagatacgaagaattgaagaagaaaggtatcttgtttgtcggttctggtgtctccggtggtgaagaaggtgctagatatggtccatctttgatgcctggtggttccgaagaggcttggccacatatcaagaacattttccaaagtatttctgctaagtctgacggtgaaccatgttgtgaatgggttggtccagcaggcgctggtcattacgttaagatggttcacaacggtattgaatacggtgacatgcaattgatctgtgaagcttacgacatcatgaagagattaggtgggttcactgataaggaaatttccgatgttttcgctaaatggaacaatggtgttttggactcctttttggtcgaaatcaccagagatattttgaaattcgatgatgtcgacggtaagccattggttgaaaagattatggacactgccggtcaaaagggtactggtaagtggactgctatcaacgctttggatttgggtatgccagttactttgattggtgaagctgtttttgccagatgtttgtccgctttaaagaatgaaagaattagagcttccaaggttttgccaggtcctgaagttccaaaggatgccgtcaaggacagagaacaattcgttgatgacttggaacaagctttgtacgcttctaagatcatctcttatgctcaaggtttcatgctgattcgtgaagctgctgctacttatggttggaagttgaacaacccagctattgccttaatgtggagaggtggttgtatcatcagatccgtcttcttaggccaaatcactaaggcctatagagaagaacctgacttggaaaaccttttgttcaacaagttctttgctgacgctgtcaccaaggctcaatccggctggagaaagtccattgctttggcaactacctacggtattccaactccagctttctctaccgctttgtctttctacgatggttacagatctgaaagattgccagccaacttattgcaagcccaaagagactactttggtgctcacactttcagagttttaccagaatgtgcttccgacaacttgcctgttgacaaggacattcacattaactggaccggtcacggtggtaacgtttcttcttccacttaccaagcttaa

SEQ ID NO: 4425 - DNA, 525 bp, Artificial Sequence
  Optimized genes for Saccharomyces cerevisiae
atgtccgctattcctgaaaacgccaacgtcactgttttgaacaagaatgaaaaaaaggctagagaattgattggtaagttgggtttgaagcaaattccaggtattatcagagttactttcagaaagaaggacaatcaaatctacgctattgaaaagccagaagttttcagatctgccggtggtaactacgttgtcttcggtgaagctaaggttgacaacttcactcaaaagttggctgccgcccaacaacaagctcaagcttctggtatcatgccatctaacgaagatgttgctaccaagtctccagaagacattcaagctgacatgcaagccgctgctgaaggttctgttaacgctgctgctgaagaagatgatgaagaaggtgaagtcgatgctggtgacttgaataaggatgacatcgaattagttgttcaacaaaccaacgtttccaagaaccaagctatcaaggctttgaaagctcacaacggtgatttggttaatgccattatgtctttgtctaaataa

SEQ ID NO: 4426 - DNA, 855 bp, Artificial Sequence
  Optimized genes for Saccharomyces cerevisiae
atggctattgatgctcaaaagttggttgtcgttatcgtcattgttgttgttccattattgttcaaattcatcattggcccaaagaccaaaccagttttggacccaaagagaaacgatttccaatctttcccattggttgaaaagactatcttgactcacaacacttccatgtacaagttcggtttacctcacgctgatgatgtcttgggtttgccaatcggtcaacacattgtcatcaaggctaacatcaacggtaaggatattaccagatcctacactccaacttctttggatggtgatactaagggtaacttcgaattattagtcaagtcttacccaaccggtaatgtttctaaaatgattggtgaattgaaaattggtgactccattcaaatcaaaggtccaagaggtaactaccactacgaaagaaactgtcgttctcatttaggtatgatcgctggtggtactggtattgctccaatgtaccaaatcatgaaagctatcgctatggatccacatgacactaccaaggtttccttggtctttggtaacgtccacgaagaagatatcttgttgaagaaggaattggaagctttggtcgctatgaagccatctcaattcaagatcgtttactacttggactctccagacagagaagactggactggtggtgttggttacatcaccaaggacgttattaaagaacacttgccagctgctaccatggacaacgttcaaattttgatctgtggtccaccagccatggttgcttctgttagaagatctactgttgacttgggtttcagaagatctaagccattgtccaagatggaagaccaagttttcgtcttctaa

SEQ ID NO: 4427 - DNA, 366 bp, Artificial Sequence
  Optimized genes for Saccharomyces cerevisiae
atggctcaaagagttactttcagaagaagaaacccatacaacactagatctaacaagatcaaggttgtcaaaactccaggtggtattttgagagcccaacacgttaagaagttggctaccagaccaaagtgtggtgactgtggttctgctttgcaaggtatctctactttgcgtccaagacaatacgctactgtttctaagactcacaagaccgtttccagagcttacggtggttccagatgtgctaactgtgttaaagaaagaattgtcagagctttcttgattgaagaacaaaagattgttaagaaggtcgtcaaggaacaaactgaagctgctaagaagtctgaaaagaagtccaagaaataa

SEQ ID NO: 4428 - DNA, 600 bp, Artificial Sequence
  Optimized genes for Saccharomyces cerevisiae
atgtctgttgaaccagttgttgttattgatggtaagggtcacttggttggtcgtttggcttctgtcgtcgctaaacaattgttgaacggtcaaaagattgttgttgtcagagctgaagaattgaacatttctggtgaattcttcagaaacaaattgaaataccacgatttcttgagaaaggctactgctttcaacaagaccagaggtccattccacttccgtgctccatctagaattttctacaaggctttgcgtggtatggtttcccacaagactgccagaggtaaagctgctttagaaagattaaaggtctttgaaggtattccaccaccatacgacaagaagaagagagttgtcgttccacaagctttgagagtcttgagattgaagccaggtagaaagtacactactttgggtaagttgtctacttccgtcggttggaagtacgaagatgtcgtcgccaagttggaagctaagcgtaaggtttcttctgctgaatactacgctaagaagagagccttcaccaagaaagttgcttccgctaacgctaccgctgccgaatctgatgttgccaagcaattagctgctttaggttactaa

SEQ ID NO: 4429 - DNA, 5277 bp, Artificial Sequence
  Optimized genes for Saccharomyces cerevisiae
atgaaggtttctgacagaagaaagtttgagaaggctaactttgacgaatttgaatctgctttgaacaacaaaaacgatttggttcattgtccatccatcactttgtttgaatccattccaaccgaagttagatctttctacgaggatgaaaagagtggtttgattaaggtcgttaaatttagaaccggtgccatggacagaaagcgttcctttgaaaaagttgttatctccgttatggttggtaagaacgttaagaagttcttgacttttgttgaagatgagccagatttccaaggtggtccaattccatccaaatatttaatcccaaaaaagattaatttgatggtctacacattgttccaagttcacactttgaaattcaatagaaaggattacgatactctatcccttttctatttgaaccgtggttactacaacgagttgtctttcagagtcctagaacgttgtcacgaaattgcttctgctcgtccaaatgattcaagcaccatgagaactttcaccgattttgtctctggtgctccaattgtcagatctttgcaaaagtccaccatcagaaagtacggctataacttggctccatacatgtttttacttttacacgttgacgaattgagcatcttctccgcttaccaagcttctttgcctggtgaaaagaaggttgacactgagagattgaagagagatttgtgtccacgtaagccaatcgaaatcaagtacttttcacaaatttgtaacgacatgatgaataaaaaagaccgtttgggtgatattttgcatatcatcttgagagcctgtgcattgaatttcggtgctggcccaagaggtggtgctggtgacgaggaagatagatccatcacaaacgaagaacctattatcccttccgtggatgaacacggtttaaaggtttgcaagttgagatctccaaacactccaagaagattaagaaagactttggatgctgtcaaggctttgttagtttcctcttgtgcttgtaccgccagagatctagatattttcgatgacaacaatggtgttgctatgtggaagtggattaaaatcttatatcatgaagttgctcaagaaactactttgaaagattcttacagaatcactttagtgccctccagcgatggtatttccttgttggcctttgctggtccacaaagaaatgtttacgtcgatgatacaacccgtcgtattcaattatacaccgactacaacaagaacggttcatccgaaccaagattgaagaccttggacggcttgaccagtgattatgttttctacttcgttaccgtcttgagacaaatgcaaatctgtgccctaggtaattcgtacgacgctttcaaccacgatccatggatggatgtcgtcgggttcgaagatcctaaccaagttaccaatcgtgatatttcaagaatcgtcttgtactcctacatgtttttgaacacagctaagggctgcttggtcgaatacgctaccttcagacaatacatgagagaattaccaaagaatgcccctcaaaaattgaactttagagaaatgcgtcaaggtttaattgctttgggtagacactgtgtcggttccagattcgaaacagatctgtatgaatcagccacttccgagttgatggctaaccactctgttcaaactggtagaaacatctacggtgttgattccttctctttaacctccgtctccggtaccactgcaaccttgttgcaagaaagagctagtgaaagatggatccaatggttgggtttggaatctgactaccattgttcattttcctccacaagaaatgctgaggacgttgtggccggtgaagccgcctcttctaaccatcatcaaaagatctcacgtgttactagaaagagaccaagagaaccaaagtctaccaatgacattttggttgctggtcaaaaattattcggttcttctttcgagtttagggacttgcaccaattgcgtttgtgttacgaaatttacatggccgatactccttcagttgctgtccaagccccaccaggttacggtaaaactgaattgttccatttgccattgattgctttggcatccaagggtgatgttgaatatgtgtctttcttattcgtcccatacactgttttactagccaactgtatgattagattgggcagatgtggttgtttgaatgtcgctccagtaagaaacttcatcgaggaaggttatgatggtgtcactgacttgtacgttggtatttatgacgacttagcatcaacgaacttcactgatagaattgccgcttgggaaaatatcgttgaatgtacttttcggacaaacaacgttaagctgggttacttgattgtcgacgaattccacaacttcgaaactgaagtctatagacaatcccaatttggtggtatcaccaacttagacttcgacgcttttgaaaaagccatctttctatcaggtactgctcctgaagctgttgcagatgctgctcttcaaagaattggtttgacaggtctagccaagaaatccatggatatcaacgaattgaagagatcagaagacttgtctagaggtttgtcaagctacccaactagaatgttcaacttgatcaaggaaaagtctgaagttccattaggtcacgtccataaaattcgtaagaaagtggaatctcaaccagaagaagcactaaaactgctattagctttgtttgaatcggaaccagaatctaaggccattgttgtcgcaagtacaaccaatgaagtcgaagaattagcctgttcctggagaaagtacttcagagttgtttggattcacggtaaattgggtgcagctgaaaaggtctccagaaccaaggaattcgtgactgatggttcaatgcaagtcttgatcggtactaagttagtcactgaaggtattgacatcaagcaattgatgatggtcatcatgttggacaacagattaaacattattgaactgatccaaggcgtcggtcgtctaagagacggtggcttgtgctacctgttatccagaaagaactcttgggctgctagaaacagaaaaggtgagttacctccaatcaaagaaggctgtattactgaacaagtcagagaattttatggtttggaatccaagaagggtaagaagggtcaacatgttggttgttgtggttctaggaccgatttatctgctgacactgtcgagttgattgaaagaatggacagattggctgaaaaacaagctactgcctctatgtccattgttgccttgccatcttcattccaagagtctaattcttccgatcgttaccgtaaatactgttcttctgatgaagactccaacacttgtatccatggttccgctaatgcatctaccaacgcatcgaccaacgctatcaccactgcttccaccaacgttagaactaatgctaccactaatgcttctacaaatgccaccacaaatgcgtctactaacgcttccaccaatgctaccaccaacgcttccactaacgccactaccaactcatctactaacgctactaccactgcttcaaccaacgttagaacctctgcaactaccactgcttctatcaacgttcgtacttccgccactactacggaatccactaactcgtcaacaaacgcaacaactaccgaatctaccaactcttccactaatgccaccactacagagagtaccaactccaatacttctgccacaaccaccgcttctatcaacgtcagaacatctgccaccaccactgaaagtaccaactcctctacttctgctaccactaccgcttcgatcaatgtgagaactagtgctactaccaccaaatctattaactcctctactaatgctactacaacagaatccactaactccaacactaatgctactaccactgaaagcaccaactcttccaccaacgccaccaccaccgagagcactaactcttctaccaacgctactactactgaaagtaccaacagtaacacctcggctgccactactgaatctactaacagcaatacctcagctacaacgacggagtccaccaacgccagcgctaaagaagatgccaacaaggacggtaacgctgaagataacagattccatccagttactgacattaacaaggaatcttacaagagaaaaggtagtcaaatggttttgttggaaagaaagaagttgaaggcccaattcccaaacacctctgaaaacatgaacgtcttacaattcttgggtttcagatccgacgaaatcaagcacctgttcttgtatggtatcgatatatacttttgcccagaaggtgttttcactcaatacggtctttgtaagggttgccaaaagatgttcgaattatgtgtttgttgggctggccaaaaggtttcatacagaagaattgcatgggaagctctagctgttgaaagaatgcttcgtaacgatgaagaatacaaagagtacttagaagacattgaaccttaccacggtgacccagtcggttacttgaagtatttctctgtcaaaagaagagagatctactctcaaattcaaagaaactatgcttggtacttggctattaccagaagacgtgaaaccatttctgttttggactctaccagaggtaagcaaggttctcaagtttttcgtatgtctggtagacagattaaggaattgtacttcaaggtctggtctaacttgagagaatctaagaccgaagttctacagtattttttgaactgggatgaaaagaagtgtcaagaagaatgggaggctaaggacgataccgttgttgtcgaagctttggaaaagggtggtgtcttccagagactacgttcgatgacttctgctggtctacaaggtcctcaatatgtcaagttgcaattttctagacatcacagacaactacgttctagatacgaattgtccttaggtatgcacttgagagaccaaatcgctttaggtgtcaccccatctaaagttcctcactggactgccttcttgtccatgttgatcggattattttacaataagactttcagacaaaagttggagtatctattggaacaaatctctgaagtctggttattgccacattggttagatttggccaatgttgaggttttggctgctgatgacaccagagttccactatatatgttaatggttgccgtccacaaggaattggattctgatgatgttccagacggtagatttgatatcttgctatgtcgtgactcttctcgtgaagttggtgaataa

SEQ ID NO: 4430 - DNA, 2049 bp, Artificial Sequence
  Optimized genes for Saccharomyces cerevisiae
atgttcttcaacagattgtccgctggtaaattgttggtcccattatccgtcgttctatatgctttatttgttgttattctaccactacaaaactccttccactcctctaacgtcttggttagaggtgctgacgacgtggaaaactatggtactgtcatcggtattgacttgggtaccacttactcttgtgttgctgtcatgaaaaacggtaagactgaaattttggccaacgaacaaggtaaccgtatcactccatcttacgttgccttcactgatgatgaaagattaattggtgatgctgccaagaaccaagtcgctgctaatccacagaacactattttcgacatcaagagattgattggtttgaagtacaacgatagatctgtccaaaaggatatcaagcatttgccattcaacgttgtcaacaaagatggtaagccagccgtcgaagtctctgttaagggtgaaaagaaggttttcaccccagaagaaatctccggtatgattttaggtaagatgaagcaaattgccgaagattacttgggcacaaaggttactcacgctgttgttaccgttcctgcctacttcaatgatgctcaaagacaagctaccaaggacgcaggtaccatcgccggtttgaatgttttgagaatcgttaatgaaccaaccgccgccgccattgcttatggtctagataaatctgacaaggaacaccaaattattgtttacgatttgggtggtggtactttcgatgtttccttgttatctattgaaaatggcgtctttgaagttcaagccacttctggtgacactcatttaggtggcgaagatttcgactacaagatcgtcagacaattgatcaaggctttcaaaaagaagcacggtatcgatgtctccgacaataacaaggccttggctaaattaaaaagagaagctgaaaaggctaagagagctttgtcttcccaaatgtctaccagaatcgaaatcgactctttcgttgatggtattgatttatcagaaactttgactcgtgctaagttcgaagagttgaacttggacttgttcaagaagaccttaaaaccagttgaaaaggtcttgcaagattctggtttagaaaaaaaggacgtcgatgacattgttttagttggtggttctactagaattccaaaggttcaacaattattggaatcctactttgacggtaagaaagcttctaagggcatcaacccagatgaagccgttgcttacggtgccgctgtgcaagctggtgtcttaagtggtgaagaaggtgttgaagatattgtcttgttggatgttaacgctttgaccttgggtattgaaaccaccggtggtgtcatgactccattgattaagagaaatactgccatccctactaagaagtctcaaatcttctccactgctgttgacaaccaaccaactgttatgatcaaagtctacgaaggtgaaagagctatgtccaaagacaacaacttactaggtaaatttgaattaactggtatcccaccagctccaagaggtgttccacaaatcgaggtcacttttgccttggatgccaatggtatcttgaaagtttctgctactgacaaaggtactggtaagtccgaatctatcaccattaccaacgataagggtagactaactcaagaagaaattgacagaatggttgaagaagctgaaaagtttgcttctgaagacgcttccattaaagccaaggtcgaatctagaaacaagttggaaaactacgctcactctttgaagaatcaagttaacggtgatttgggtgaaaaattggaggaagaagacaaggaaactttgctagacgctgctaacgacgttttggaatggttagatgataacttcgagaccgctattgctgaagattttgatgagaaattcgaaagtttgtccaaggtggcttacccaattacttccaagttgtacggtggtgctgatggttccggcgctgctgattatgatgacgaggatgaagacgatgacggtgactattttgaacatgacgaattgtaa

SEQ ID NO: 4431 - DNA, 999 bp, Artificial Sequence
  Optimized genes for Saccharomyces cerevisiae
atgatcagaattgctatcaacggtttcggtcgtattggtagattggttttgagattagctttgcaaagaaaggatattgaagttgtcgctgtcaacgacccattcatttctaacgattacgctgcttacatggttaagtatgactctacccacggtagatacaagggtactgtttcccacgatgacaagcatatcattattgacggtgtgaagatcgctacttaccaagaaagagatccagctaacttgccatggggttctttgaagattgatgttgctgtagattctactggtgttttcaaggaattggacaccgctcaaaagcacattgacgctggtgctaagaaggtcgtcatcactgctccatcttcctctgctcctatgttcgttgttggtgttaaccacaccaagtacactccagataagaaaattgtctccaacgcttcttgtaccaccaactgtttggctccattggccaaggttatcaatgacgcctttggtatcgaagaaggtttgatgactaccgtccactccatgaccgccactcaaaagaccgttgatggtccttctcacaaggactggagaggtggtagaactgcctctggtaacatcatcccatcctccaccggtgccgccaaagctgtcggtaaagttttaccagaattacaaggtaagttaactggtatggctttcagagttccaactgtggatgtctctgttgtcgatttgactgtcaagttggaaaaggaagctacctacgatcaaatcaagaaggccgtcaaggctgccgctgaaggtccaatgaagggtgtcttaggttatactgaagatgctgttgtttcttctgatttcttgggtgacactcacgcttccattttcgatgcctccgccggtattcaattgtctccaaagttcgtcaaattgatctcttggtacgacaacgaatatggttactctgccagagtcgttgacttgattgaatacgttgccaaggcttaa

SEQ ID NO: 4432 - DNA, 900 bp, Artificial Sequence
  Optimized genes for Saccharomyces cerevisiae
atgaagttatccaagttgtctattttgacttctgccttggctacatctgctttagctgctccagccgttgttactgtcactgaacatgctcacgaagctgctgtcgtcaccgttcaaggtgttgtttacgtcgaaaacggtcaaaccagaactacttatgaaactttggcaccagcttctaccgccaccccaactagtactgccactgctttggttgccccaccagttgctccatcttctgcttcttctaactccgatgttgtcttgtccgctttgaagaacttggcctctgtctggggtaagaccactgactccaccactaccttgacatcatctgaatctacctctcaatctttggcccaagctactaccaccagcactcctgctgccgcctccactacttcaactccagctgctaccactacaacttcccaagccgcagctacttcttccgcctcatcctccgactctgatttgagtgatttcgcttcctctgttttggctgaacacaacaagaagagagctttgcacaaggacactccagcattatcttggtctgacaccttagcatcttatgctcaagattacgctgacaactatgactgttctggtactttgacccactccggtggtccatacggtgaaaatttggcattgggttacgatggtcctgccgctgttgatgcttggtacaacgaaatttctaattacgacttctccaacccaggtttctcttcaaacactggtcacttcactcaagtcgtttggaagtctactacccaagttggttgtggtatcaagacttgtggtggtgcttggggtgactacgttatctgttcctacgatccagctggtaactacgaaggtgaatacgctgataacgttgaaccattggcttaa

SEQ ID NO: 4433 - DNA, 6645 bp, Artificial Sequence
  Optimized genes for Saccharomyces cerevisiae
atggctactattgctccaactgccccaatcacccccccaatggaatcaaccggtgataggttggttactctagaattgaaagatggtactgttttgcaaggttactctttcggtgctgaaaagtctgtcgctggtgaattagtcttccaaactggtatggtcggttacccagaatctgttacagatccatcttacgagggtcaaatattagttattacttacccattagtaggtaactatggtgttccagatatgcacttaagagatgagctcgtcgaagaactgcctcgttactttgaaagtaatagaattcacatcgccggtttggttatttctcattacaccgatgaatattcccactatttagccaagtcctctttgggcaaatggttacaaaacgaaggtattccagctgtttatggtgttgacactagatccttgacaaagcacttgagagatgctggctctatgcttggcagattgtctttggagaagtctggttccgacagaacaatttccagatcatcttcttggagatctgctttcgacgttccagaatgggttgacccaaacgtgcaaaatttagtttccaaagtttccatcaacgaaccaaagttgtatgtgccaccagctgataacaagcatattgaactgcaaactggtccagacggtaaggttttgagaatcttagccattgatgtcggtatgaagtataaccaaatccgttgtttcatcaagagaggtgttgaattgaaggtggtcccatggaattatgatttcactaaggaagattacgatggtttgttcatttctaacggtccaggtgacccatccgtcctagatgacttgtcccaaagattaagtaacgtattggaagctaagaaaaccccagttttcggtatctgtttgggtcaccaattaatcgctagagctgctggtgcctctaccttgaaactgaagtttggtaacagaggccacaacattccatgtacctccactatttcaggtagatgttatattacatcgcaaaaccacgggtttgcagtcgatgttgatactttgacttccggttggaagccactatttgtcaacgcaaacgacgactccaacgaaggtatctaccattctgaattgccatatttctccgttcaattccaccctgaatcgacacctggtccccgtgacactgaattcttattcgacgtctttattcaagctgttaaggagtttaagtacacccaagttttgaagcctattgcttttccaggtggtttgttggaagacaacgtcaaggctcacccaagaatcgaggccaagaaggtcttggttctaggctccggcggtctttcgattggtcaagccggtgaatttgactacagtggttctcaagctatcaaggctttgaaggaagaaggtatttataccattttaattaacccaaacattgctacaatccaaacctcaaagggtttagctgacaaagtttactttgttccagttaccgctgaattcgttagaaaggtcatcttgcacgaaagacctgacgccatctatgttaccttcggtggtcaaaccgcattatcagttggaattgctatgaaggatgaatttgaagctctaggtgtcaaggttttaggcactccaattgacaccatcattaccaccgaagacagagaacttttctctaatgcaattgacgaaattaatgaaaaatgtgctaagtctcaagcagccaactctgtagatgaagctttggctgctgttaaggaaatcgggttccctgtcattgtacgtgctgcttatgctttaggtggtttgggttctggtttcgccaataatgaaaaagagttagtggatttgtgtaatgttgcattttcatcctctcctcaagtcttggttgaaaagtccatgaagggttggaaagaagttgagtatgaagttgtccgtgatgctttcgacaactgtatcactgtttgtaacatggaaaacttcgatcctctaggtatccacactggtgactcaattgtcgttgctccttcccaaacattatctgatgaagattacaatatgttgaggaccactgccgtcaacgttatcagacatttaggtgttgttggtgaatgtaacatccaatatgccttgaacccagtctctaaggactattgtattattgaggttaacgctagattgagcaggtcttccgccttggcctccaaggctaccggttaccctttagcttacacagccgctaagttgggtttaaatatcccattgaatgaagtcaaaaactccgtgacaaaatcaacatgtgcctgttttgaaccttctttggactactgtgttgttaagatgccacgttgggatttgaagaaattcacccgtgtttctactgaattatcctcttcgatgaaatctgtcggcgaagtcatgtctatcggtagaactttcgaagaagccattcaaaaggctattagatctactgaatacgccaacttgggttttaacgagaccgacttggacatcgatatcgattatgaattaaacaatccaactgacatgagagtttttgctattgctaacgcctttgccaagaagggatactctgtcgacaaggtctgggaaatgaccagaatcgacaagtggttcttgaacaagttgcatgacttggtccaatttgctgaaaagatctcttcattcggtaccaaggaagaattgccatcattggtcttacgtcaagccaagcaattgggtttcgatgatagacaaattgcaagatttttggatagcaacgaagttgctatcagaagattgagaaaggaatacggtattactcctttcgtaaaacaaattgacacagtcgctgccgaattcccagcctacactaactacttgtacatgacttacaacgctgactctcacgacttatctttcgacgatcatggtgtgatggttttgggttctggtgtctacagaattggttcatcagtggaatttgactggtgtgcagtgactgctgtgcgtacactgagggctaacaacatcaagactatcatggttaactacaaccctgaaaccgtctccactgactatgacgaagccgatcgtttatacttcgaaactatcaacttggaacgtgtcttggatatttacgaaattgaaaactcttccggtgtcgttgtcagcatgggtggccaaacttctaacaacattgccatgacgctacacagagagaacgttaaaattttgggtacatctccagacatgattgattcagccgaaaacagatacaagttctcaagaatgttggaccaaatcggtgttgatcaacctgcttggaaggaattaacttccatggacgaagctgaatcctttgctgaaaaggttggttatccagtgctagttagaccatcttacgttttgtctggcgccgccatgaacactgtgtactccaagaacgatcttgaatcttatctaaatcaagctgtcgaagtttctagagactatccagttgttatcaccaaatacatcgaaaatgctaaggaaattgaaatggatgcagttgccagaaacggtgagttggtcatgcatgttgtttcagaacacgttgaaaatgctggtgtacactctggtgacgctaccttgattgttcctccacaagatttggctccagaaaccgttgaccgtatcgttgttgccaccgctaagatcggtaaggccttaaagattaccggtccatacaatattcaatttattgctaaggataatgagattaaagttattgaatgtaacgtcagagctagcagatctttcccatttatctctaaggttgtcggtgtcaacttgatcgaattggctactaaagccattatgggtctacctttgactccatacccagtcgaaaaattgccagatgactacgttgctgtcaaggttccacagttttccttcccaagattggctggtgctgaccctgttttaggtgttgaaatggccagtacaggtgaagtcgccacctttggtcatagcaagtacgaagcatatttgaaatctttactagctactggtttcaagctaccaaagaagaatattctattgtctattggtagttataaggagaaacaagaattgctatctagtgtccaaaagttgtacaacatgggttacaaattatttgccacttcaggtactgcagacttcctttctgaacacggtattgccgttcaatacttggaagttttgaacaaagacgatgatgaccaaaaatccgaatactcattaacacaacatttggctaataacgaaattgatttatatatcaatctaccctccgctaacagattccgtagaccagcatcatacgtctccaagggttacaagaccagacgtttggctgtcgattattctgttccattggtcaccaacgttaagtgtgctaaattgttgattgaagctatttccagaaacatcaccttagacgtgagtgaaagagacgctcaaacctcgcatagaaccatcactttacctggcctcatcaacattgccacttatgtcccaaatgcctcccatgtcattaagggcccagctgaattgaaggaaactaccagactgtttttagaatctggtttcacatactgtcaattgatgccaagaagcatcagtggtcctgttatcactgatgtggcttccttgaaggctgctaactccgtttctcaagattcctcctacactgatttttctttcactatagcaggtaccgcccacaatgctcattccgttactcaatctgcttctaaagtcaccgctttgtttttgccattgcgtgaattgaagaacaagatcactgctgtcgcagaattattgaaccaatggccaacagaaaagcaagtgatcgctgaagctaagactgctgatttggcatctgtgttacttttgacttctttgcaaaaccgttccattcatatcactggcgtttcaaacaaggaagatttagcattgattatgactgtcaaggccaaggacccaagagttacttgtgatgttaacatctactcgttattcattgcccaagatgattacccagaggctgttttcttgcctaccaaggaagaccaagaattcttctggaacaacttggattctatcgatgccttctctgttggtgctttgccagttgctttggccaacgtcactggtaacaaggtcgatgttggtatgggcattaaggactccttgccattgttgcttgctgccgtcgaggaaggtaaattgaccattgacgacattgtcttgagattacacgataaccccgctaagattttcaacattcctactcaagactctgttgtggaaatcgacctagactactcttttagaagaaataagagatggtctccattcaacaaggacatgaatggtggtatcgaaagagtcgtctacaacggtgaaactttggtgttgtccggtgaactagtctctccaggtgctaaaggtaagtgtatcgtcaacccatccccagcttctattactgctagtgctgaactacaatccacctctgccaagagaagattctccatcacagaggaagccatcgccgacaatcttgatgctgctgaggatgctattccagaacaaccattggaacaaaagttaatgtcttctcgtccaccaagagaattggttgctccaggtgccatccaaaatttgatcagatccaacaacccattcagaggtagacacattttgagtatcaagcaattcaagcgttctgactttcacgttctgttcgctgtagctcaagagttgagagccgctgttgccagagaaggtgtcttagatttgatgaagggtcacgtcatcacaaccatctttttcgaaccatctacaagaacctgttctagcttcatcgcagctatggagagattgggtggtagaattgttaatgtcaatcctcttgtttccagcgtaaagaagggtgaaacattgcaagacaccattagaactttggcttgttactccgatgccattgttatgcgtcactctgaagaaatgtccgtccacattgctgcaaagtactctccagtaccaattatcaacggtggtaatggttcccgtgaacatccaacccaagctttcttggacttgtttactatcagagaagaaattggtactgtaaatggtattactgtcactttcatgggtgatctaaagcacggtcgtactgttcactccttatgtagattgttgatgcactaccaagttcgtattaacttagtctcaccacctgagctaagattaccagaaggcttgagagaagaattgagaaaagctggtctactgggtgttgaatccattgaattgaccccacatatcatctccaagaccgatgtcctttactgtactagagttcaagaagaaagattcaacagtccagaagagtacgctcgtctaaaggatacctacattgtcgacaacaaaatcttggctcacgctaaagaaaacatggctatcatgcatccattaccaagagtgaacgaaatcaaagaagaagtggactacgaccacagagctgcttacttcagacaaatgaaatacggtttgttcgtcagaatggctttgttagctatggttatgggtgttgatatgtaa

SEQ ID NO: 4434 - DNA, 264 bp, Artificial Sequence
  Optimized genes for Saccharomyces cerevisiae
atggaaaacgacaagggtcaattggttgaattgtacgttccaagaaagtgttctgctaccaacagaatcatcaaggctgatgaccacgcttctgttcaaatcaacgttgctaaggttgatgaagaaggtagagctattccaggtgaatacatcacttacgctttgtctggttacgtcagatctagaggtgaatctgatgattctttgaacagattggctcaaaacgatggtttgttgaagaacgtctggtcttactctcgttaa

SEQ ID NO: 4435 - DNA, 1188 bp, Artificial Sequence
  Optimized genes for Saccharomyces cerevisiae
atgtctgaaggtattaccgatatcgaagaatctcaaattcaaaccaactacgataaagtcgtttacaaattcgatgacatggaattggatgaaaacttgttgcgtggtgtctttggttacggtttcgaagaaccatctgctattcaacaaagagctatcatgccaattattgaaggtcacgatgttttggctcaagctcaatctggtaccggtaagactggtactttctccatcgctgctttgcaaagaattgacacttctgtcaaggctccacaagctttgatgcttgccccaacccgtgaattggctctacaaatccaaaaggttgtcatggctttagctttccacatggacattaaggtccacgcttgtattggtggtacttcctttgtcgaagacgctgaaggtttgagagatgcccaaattgttgttggtactccaggtagagttttcgacaacatccaacgtagaagatttagaactgacaagatcaagatgttcattttggacgaagctgatgaaatgttgtcttctgggttcaaggaacaaatctaccaaattttcactttattgccaccaactactcaagttgttttattatctgctaccatgccaaacgatgtcttggaagttactaccaagttcatgcgtaacccagttagaattttagttaagaaggacgagttgaccttggagggtatcaagcaattctacgttaacgttgaagaggaagaatacaagtacgaatgtttgactgatttgtacgactctatctctgttacccaagccgttatcttctgtaacaccagaagaaaagttgaagaattaaccactaagttgagaaacgacaaatttactgtttctgccatttactctgatttgcctcaacaagaaagagacaccattatgaaggaattcagatccggttcttccagaatcttgatttctaccgacttgctagctagaggtattgatgttcaacaagtctctttggttattaactatgacttaccagctaacaaggagaactacattcacagaatcggtagaggtggtagattcggtagaaagggtgttgctatcaacttcgtcactaacgaagatgtcggtgctatgagagaattggaaaagttttactccactcaaattgaagaattgccatccgatattgctactttgttgaactaa

SEQ ID NO: 4436 - DNA, 402 bp, Artificial Sequence
  Optimized genes for Saccharomyces cerevisiae
atggatcgtgatcacattaacgatcatgaccacagaatgtcttactctatcaacaaggatgatttactattaatggttttggctgttttcattccaccagttgctgtctggaagagaaagggtatgttcaacagagacactttgttgaacttgttattgttcttgttgttattcttcccagccattattcatgcttgttacgttgtttacgaaacttcctctgaaagatcttatgacttgtccagaagacacgctactgctccagctgttgacagagatttggaagcccatccagctgaagaatctcaagctcaaccacctgcttacgatgaagatgacgaagctggtgctgatgttccattgatggacaacaagcaacaattgtcttctggtagaacttaa

SEQ ID NO: 4437 - DNA, 555 bp, Artificial Sequence
  Optimized genes for Saccharomyces cerevisiae
atggctagatacggtgctacctctaccaacccagctaaatctgcttctgcccgtggttcttacttgagagtttctttcaagaacaccagagaaactgctcaagccatcaacggttgggaattgaccaaagcccaaaaatacttagaccaagttttggaccaccaaagagccattccattcagaagattcaactcctctattggtagaaccgctcaaggtaaggaattcggtgttaccaaggccagatggccagccaagtctgtcaagttcgttcaaggtttgttgcaaaacgctgccgctaatgctgaagccaagggtttggatgctactaagttgtacgtttcccacatccaagtcaaccaagctccaaagcaacgtagaagaacttacagagctcacggtcgtattaacaagtacgaatcttctccatctcacattgaattagttgttactgaaaaagaagaagctgttgctaaggctgctgaaaagaaggttgtcagattgacttccagacaaagaggtagaattgctgctcaaaagagaatctccgcttaa

SEQ ID NO: 4438 - DNA, 156 bp, Artificial Sequence
  Optimized genes for Saccharomyces cerevisiae
atggctgctcaaaagtctttcagaatcaagcaaaaaatggccaaggctaagaagcaaaacagaccattgccacaatggattagattgagaaccaacaacactatcagatacaacgctaagagaagaaactggagaagaactaagatgaacatttaa

SEQ ID NO: 4439 - DNA, 393 bp, Artificial Sequence
  Optimized genes for Saccharomyces cerevisiae
atgactagatcttctgttttggctgatgctttgaatgctatcaacaacgctgaaaagactggtaagagacaagtcttgatcagaccatcttccaaggtcatcatcaagttcttgcaagttatgcaaaagcacggttacatcggtgaattcgaatacattgatgatcacagatccggtaagatcgttgttcaattgaacggtagattgaacaagtgtggtgttatttctccaagattcaacgtcaagattggtgacattgaaaaatggactgctaacttgttgccagctcgtcaattcggttacgttatcttgaccacttctgctggtatcatggaccacgaagaagctagaagaaagcatgtttctggtaaaattttgggtttcgtttactaa

SEQ ID NO: 4440 - DNA, 999 bp, Artificial Sequence
  Optimized genes for Saccharomyces cerevisiae
atggttagagttgctattaacggtttcggtagaattggtagattggtcatgagaatcgccttgcaaagaaagaacgttgaagttgtcgctttgaatgatccattcatctctaacgactactctgcttacatgttcaagtatgactctactcacggtcgttacgctggtgaagtctctcacgatgacaagcacattattgtcgacggtcacaaaattgctactttccaagaaagagacccagctaacttgccatgggcttctttgaacattgacattgccattgattctacaggtgttttcaaagaattggacactgctcaaaagcatatcgatgctggtgctaagaaggttgttattactgctccatcttccactgccccaatgtttgttatgggtgtcaatgaagaaaagtacacttctgacttaaagattgtttccaatgcttcctgtaccaccaactgtttggctccattggccaaggtcatcaacgatgcctttggtattgaagaaggtttgatgaccactgtccactccatgactgccactcaaaagaccgtcgatggtccatcccacaaggactggagaggtggtagaactgcatctggtaacatcattccaagttctaccggtgccgctaaggctgttggtaaggttttaccagaattacaaggtaaattgactggtatggctttcagagttccaactgttgatgtttctgttgttgacttgaccgttaagttaaacaaggaaactacttacgatgaaatcaagaaagttgtcaaagctgctgctgaaggtaagttgaagggtgttttgggttatactgaagacgctgtcgtttcttctgatttcttgggtgactccaactcctctattttcgatgctgccgccggtatccaattgtctccaaagttcgtcaagttggtttcttggtacgacaacgaatacggttactccaccagagtcgtggatttggtcgaacacgttgccaaggcttaa

SEQ ID NO: 4441 - DNA, 1758 bp, Artificial Sequence
  Optimized genes for Saccharomyces cerevisiae
atgggtttattgaccaaggttgctacttccagacaattttctaccactagatgtgtcgcaaagaaattgaacaaatattcttacattattaccgaaccaaagggccaaggtgcttcccaagctatgttatacgccaccggtttcaagaaagaggatttcaagaagccacaagttggtgtcggttcttgttggtggtctggtaacccatgtaatatgcacttgttggacttaaacaatagatgctctcaatccattgaaaaggctggtttgaaagccatgcaattcaacactatcggtgtttctgatggtatctccatgggtactaagggtatgagatactctttacaaagtcgtgaaattattgctgattctttcgaaaccatcatgatggctcaacactacgacgctaacatcgctattccatcctgtgataagaacatgccaggtgtcatgatggctatgggtagacacaacagaccatctattatggtttacggcggtaccattttaccaggccatccaacttgtggttcttctaagatctctaaaaacattgacattgtctccgctttccaatcctacggtgaatatatttccaaacaattcactgaagaagaaagagaagatgttgttgaacacgcttgtccaggtcctggttcatgtggtggtatgtacactgctaacaccatggcttctgctgccgaagttttaggtttgacaatcccaaactcctcttccttcccagctgtgtccaaggaaaaattagctgaatgtgacaatattggcgaatacatcaagaagactatggaattgggtattttgccaagagatatcttaaccaaggaagcctttgaaaatgctatcacttacgtcgtggccactggtggttccaccaacgctgtcttgcatttagttgccgttgctcactctgctggcgtcaagttatctccagatgacttccaaagaatttctgacactactccattaattggtgactttaagccttcaggtaagtacgttatggctgacttgatcaacgttggtggtactcaatctgttatcaaatacttgtacgaaaacaacatgttgcacggtaacacaatgactgttactggcgatactttggctgaacgtgccaagaaggctccatctttgcctgaaggtcaagaaatcattaaaccattgtctcacccaattaaggccaacggtcatttgcaaatcttgtatggttccttggccccaggtggtgctgttggaaaaattactggtaaagaaggtacctacttcaaaggtagagctagagttttcgaagaagagggtgccttcatcgaagctttggaaagaggtgaaatcaagaagggtgaaaagaccgtcgttgtcatcagatatgaaggtccacgtggtgctccaggtatgccagaaatgttgaagccatcatctgccttgatgggttacggtttgggtaaggatgtcgctctattgactgatggcagattctccggtggctctcatggtttcttgattggtcacattgttccagaagctgctgaaggtggtccaatcggtctagttagagacggtgatgaaattatcatcgatgccgacaacaacaagattgatttgttggtctctgacaaggaaatggcccaaagaaagcaatcttgggttgctcctccaccaagatacaccagaggtaccttgtccaagtacgctaagttggtttccaacgcctccaatggttgtgttttggatgcttaa

SEQ ID NO: 4442 - DNA, 534 bp, Artificial Sequence
  Optimized genes for Saccharomyces cerevisiae
atgttcaacactaccccaattaacattgataaatggttgaaagaaaatgaaggtttgttgaagccaccagtcaacaactactgtttgcacaagggcggtttcactgttatgattgtcggtggtccaaacgaaagaaccggttaccacatcaacccaactccagaatggttctaccaaaagaagggttccatgttattgaaggtcgttgatgaaactgatgctgaaccaaagttcattgacattatcatcaacgaaggtgactcttacttgttgccaggtaacgttccacactctccagttagattcgctgacaccgttggtattgttgtcgaacaagacagaccaggtggtgaaaacgacaagatcagatggtactgttctcattgtagacaagttgttcacgaatctgaattgcaaatgttggacttgggtactcaagtcaaggaagctattttggatttcgaaaacgatgttgaaaagagaacttgtttccactgtaagactttgaactatgctagacctcaatctaactaa

SEQ ID NO: 4443 - DNA, 936 bp, Artificial Sequence
  Optimized genes for Saccharomyces cerevisiae
atgtctgtttccgctgccccagctattcctcaatactctgtctctgactacatgaagtttgcattggccggtgctatcggttgtggttcaactcactcttccatggtcccaattgatgttgttaagactagaatccaattggaaccaactgtttacaataagggtatggttggctctttcaagcaaattattgctggtgaaggtgccggcgctttattgactggttttggcccaactctattgggttactccattcaaggtgctttcaagttcggtggttacgaagttttcaagaaattcttcattgacaacttaggttatgacactgcttccagatacaagaactccgtctacatgggttctgctgctatggctgaatttttggctgatatcgctttgtgtccattggaagctactcgtatcagattagtttctcaaccacaatttgctaacggtcttgttggtggtttctctagaattttgaaagaagaaggtattggttccttctattccggtttcactccaatcttgttcaaacaaatcccatacaacattgccaagttcttggtctttgaaagagcttctgaattctactacggtttcgctggtccaaaggaaaagttgtcttctacttctaccactttgttgaacttgttatctggtttgaccgctggtttagctgctgccattgtctcccaacctgctgacaccttgttgtccaaggttaacaagaccaagaaggctccaggtcaatctactgtcggtctactagctcaattggctaagcaattagggttctttggttcctttgccggtttgccaaccagattggttatggttggtactttaacttccttgcaattcggtatctatggttctttgaagtccactttgggttgcccaccaaccattgaaattggtggtggtggtcattaa

SEQ ID NO: 4444 - DNA, 318 bp, Artificial Sequence
  Optimized genes for Saccharomyces cerevisiae
atggaacacccagcttacactttgtctttgttgaccactgctggtggtttgatgggttactacagaaagggttctattccatccttggtttctggtttagttttcggttccgtttacggtattgctggttacttgttgcacatgaacagagatggtggtttggaaatggctttgggtgcttctactttattattgggtgccggtgttatcagaggtatgccatctagattcaccaagccagttccagtcgttttgactgccttaggtggtctaggttcttactactattacaacaagtacaaggaattctacccatga

SEQ ID NO: 4445 - DNA, 279 bp, Artificial Sequence
  Optimized genes for Saccharomyces cerevisiae
atggctaagagaaccaagaaggttggtattactggtaagtacggtgttagatatggttcttctttgcgtagacaagttaagaagttggaaattcaacaacacgctagatacgactgttctttctgtggtaaaaagaccgtcaagagaggtgccgccggtatctggacttgttcctgttgtaagaagactgttgctggtggtgcttacactgtttctactgctgccgctgctactgtcagatctaccatcagaagattgagagaaatggttgaagcttaa

SEQ ID NO: 4446 - DNA, 465 bp, Artificial Sequence
  Optimized genes for Saccharomyces cerevisiae
atggttcaagccgttgctgttttgaagggtgatgctggtgtctctggtgttgttaagttcgaacaagcttctgaatccgaaccaaccactgtttcctacgaaattgccggtaactctccaaacgctgaaagaggtttccacattcacgaattcggtgacgctaccaacggttgtgtttctgctggtccacatttcaacccattcaagaagactcacggtgctccaactgacgaagttagacacgttggtgacatgggtaacgtcaagaccgatgaaaacggagttgccaagggttctttcaaggactccttgatcaagttgattggtccaacttctgtcgtcggtagatctgttgtcatccacgctggtcaagatgatttgggtaagggcgacactgaagaatctttgaaaactggtaatgctggcccaagaccagcttgtggtgttatcggtttgactaactaa

SEQ ID NO: 4447 - DNA, 1023 bp, Artificial Sequence
  Optimized genes for Saccharomyces cerevisiae
atgactgctccattggtggttctaggtaacccattattggatttccaagctgatgttactgccgaatacttggctaagtactccttgaaggaaaacgatgccatcttggttgatgctaagtctggtgacgccaagatggccattttcgatgaattgttgcaaatgccagaaaccaagttggttgctggtggtgctgctcaaaacaccgctagaggtgccgcttacgttttgggtgctggccaagttgtttacttcggttctgtcggtaaggataagttctctgaaagattgttaaacgaaaatgaaaaggctggtgtcaagtccatgtaccaagtccaaaatgacattggtactggtaagtgtgctgccttgattaccggtcacaacagatctttggttaccgatttaggtgctgctaatttcttcaccccagaccatttggacaagcactgggatttggtcgaagcagccaagttattctacatcggtggtttccacttgaccgtttctccagatgctatcgttaaattgggtcaacacgctaaagaaaactccaaaccatttgtcttgaacttctccgccccattcattccacacgttttcaaggacgctttggccagagttttgccatacgctactgttattattgctaacgaatctgaagctgaagccttctgtgatgctttccaattggactgtgccaacactgacttggaagctattgcccaaagaattgtcaaagactccccagttgagaagactgtcatcttcactcacggtgttgaaccaaccgtcgttgtctcttccaagggtacctctacttaccctgttaagccattggactcttctaagattgttgacaccaacggtgccggtgatgcctttgctggtggtttcatggctggtttgactaaaggtgaagacttagaaacttctattgacatgggtcaatggttagctgctttgtctatccaagaagttggtccatcttacccatccgaaaagatctcctactctaaataa

SEQ ID NO: 4448 - DNA, 678 bp, Artificial Sequence
  Optimized genes for Saccharomyces cerevisiae
atgtctgacaccgaagctccagtcgaagttcaagaagattttgaagttgttgaagaattcactccagttgtcttggccaccccaattccagaagaagtccaacaagctcaaactgaaattaaattgttcaacaaatggtctttcgaagaggtggaagtcaaggatgcttctttggttgactacgttcaagtcagacaaccaatcttcgttgctcacactgctggtcgttatgctaacaagagattcagaaaggcccaatgtccaattattgaaagattgaccaactccttgatgatgaacggtagaaacaacggtaagaagttgaaggctgttagaatcattaagcacaccttggatatcatcaacgttttgactgaccaaaacccaattcaagttgtggtcgacgctattactaacactggtccaagagaagacactaccagagtcggtggtggtggtgccgccagaagacaagctgtcgatgtttctccattgagaagagttaaccaagccattgctttgttgactattggtgctagagaagccgctttccgtaacatcaagaccattgccgaaactttggctgaagaattgattaacgctgctaagggttcttctacttcttacgctatcaaaaagaaggacgaattggaacgtgttgccaagtctaacagataa

SEQ ID NO: 4449 - DNA, 1080 bp, Artificial Sequence
  Optimized genes for Saccharomyces cerevisiae
atgtctactaaggtcgttaacgttgctgttattggtgctggtgttgtcggttctgccttcttagaccaattattggctatgaagtccaccattacttacaacttggttttgttggctgaagctgaaagatctttgatctccaaggacttctctccattgaatgttggctctgactggaaagctgccttggccgcttctaccaccaagactttgccattggacgatttaattgctcacttgaaaacttccccaaagcctgttattttggtcgacaacacttcttccgcttacatcgccggtttctacacaaagttcgttgagaacggtatttccattgctactccaaacaagaaggctttctcttctgatctagccacttggaaggctttgttctccaacaagccaactaatggttttgtttaccacgaagctaccgtcggtgccggtttaccaattatctctttcttgagagaaattattcaaactggtgacgaagttgaaaaaattgaaggtattttttccggtactttatcttacattttcaacgaattctccacttctcaagctaacgatgttaaattcagcgacgttgttaaggtcgctaagaaattgggttacactgaaccagacccaagagatgacttgaacggtttggatgttgccagaaaggttactattgttggtagaatttctggtgttgaagtcgaatctccaacctccttcccagtccaatctttgattccaaagccattagaatccgtcaagtctgctgatgaatttttggaaaagttgtctgactacgacaaggatttgactcaattgaagaaggaagccgccaccgaaaacaaagtcttgagattcatcggtaaggttgacgtcgccaccaaatccgtttctgttggtatcgaaaagtacgattactctcatccattcgcttccttgaagggttccgacaatgtcatctccatcaagaccaagagatacaccaacccagttgttatccaaggtgctggtgcaggtgctgctgtcactgctgctggtgtcttaggtgatgtcattaagatcgctcaaagattgtaa

SEQ ID NO: 4450 - DNA, 786 bp, Artificial Sequence
  Optimized genes for Saccharomyces cerevisiae
atggctagaggtccaaagaagcacttgaagagattggctgctcctcaccactggttgttggacaagttgtccggttgttatgctccaagaccatctgccggtcctcataaattgcgtgaatctttaccattgattgttttcttgagaaacagattaaagtacgctttgaacggtagagaagttaaggctattttgatgcaaagacacgttaaggttgacggtaaggtcagaactgacaccacttacccagctggtttcatggatgttatcactttggatgccaccaacgaaaacttcagattggtctacgatgtcaaaggcagattcgctgttcacagaattactgatgaagaagcttcttacaagttaggtaaagtcaagaaagttcaattgggtaagaagggtgttccatacgttgttactcacgatggtagaaccatcagatatccagacccaaacatcaaggttaacgacactgtcaagattgacttggcctctggtaagatcaccgatttcatcaaattcgatgctggtaaattagtttacgtcactggtggtcgtaacttgggtagaatcggtaccattgtccacaaggaaagacatgatggtggttttgatttggttcatatcaaggactctctagacaacactttcgttaccagactaaacaacgtttttgttattggtgaacaaggtaagccatacatttctttgccaaaaggtaagggtattaagttgtctattgctgaagaaagagacagaagaagagctcaacaaggtttgtaa

SEQ ID NO: 4451 - DNA, 609 bp, Artificial Sequence
  Optimized genes for Saccharomyces cerevisiae
atggctaccaacattacctggcatccaaacttaacttacgatgaaagaaaggctttgcgtaagcaagatggttgtaccatctggttgactggtttatctgcttctggtaagtctaccattgcttgtgcattagaacaattgttgttgcaaaagaacttgtccgcttacagattggacggtgacaacattagattcggtttgaacaaggacttgggtttctctgaaaaagatagaaacgaaaacatcagaagaatctccgaagtctccaagttgtttgctgactcttgtgccatttccatcacttctttcatctctccatacagagttgacagagacagagctagagaattgcacaaggaggctggtttgaagttcattgaaattttcgttgatgttccattggaagttgctgaacaaagagatccaaagggtttgtacaagaaggccagagaaggtgttatcaaggaattcaccggtatttctgccccatatgaagctccaaaggctccagaattacatttgagaactgaccaaaagactgttgaagaatgtgctactattatttacgaatacttgatttcagaaaagatcatcagaaagcacttataa

SEQ ID NO: 4452 - DNA, 417 bp, Artificial Sequence
  Optimized genes for Saccharomyces cerevisiae
atgtctactgactctattgtcaaggcttccaactggagattggtcgaagttggtagagttgtcttgatcaagaagggtcaatctgctggtaagttggctgctattgttgaaattattgaccaaaaaaaggttttgattgatggtccaaaggccggtgttccaagacaagctatcaacttgggtcaagttgttttaactccattgactttcgctttgccaagaggtgctagaactgctactgtctccaagaagtgggccgccgctgctgtttgtgaaaaatgggctgcttcttcttgggctaagaagattgctcaaagagaaagaagagctgccttgaccgatttcgaaagattccaagtcatggttttgagaaagcaaaagagatacactgttaagaaagctttggccaaggcttaa

SEQ ID NO: 4453 - DNA, 504 bp, Artificial Sequence
  Optimized genes for Saccharomyces cerevisiae
atgattatttacaaggatattttctctaacgatgaattgttgtctgatgcttacgatgccaaattggttgatgatgtcatctacgaagctgactgtgccatggtcaacgttggtggtgacaacattgacattggtgccaatccatctgctgaaggtggtgatgacgatgttgaagaaggtgctgaaatggttaacaacgtcgttcactctttcagattgcaacaaactgctttcgacaagaaatccttcttgacttacatcaagggttacatgaaggctgtcaaggccaagttgcaagaaaccaacccagaagaagttccaaagttcgaaaaaggtgctcaaacctacgttaagaaggttatcggttctttcaaggactgggaattcttcactggtgaatccatggacccagacgctatggttgttatgttgaactacagagaagatggtactactccattcgttgctatctggaagcacggtattgtcgaagaaaagatttaa

SEQ ID NO: 4454 - DNA, 1080 bp, Artificial Sequence
  Optimized genes for Saccharomyces cerevisiae
atgggtgttgaacaaatcttgaagagaaagactggtgtcattgttggtgaagatgttcacaacttattcacttacgccaaggaacacaagtttgctattccagccatcaacgttacttcttcttctactgctgttgctgccttggaagctgctagagactccaagtccccaatcattttgcaaacttccaatggtggtgccgcttatttcgctggtaagggcatctctaatgaaggtcaaaacgcttccatcaagggtgctatcgccgccgctcactacattagatctatcgctccagcttacggtatcccagttgtcttgcactctgatcattgtgctaagaaattgttgccatggttcgatggtatgcttgaagctgatgaagcctactttaaagaacatggtgaaccattgttctcctctcacatgttggatttgtctgaagaaaccgacgaagaaaacatttccacttgtgttaaatacttcaagagaatggctgctatggaccaatggttagaaatggaaattggtattactggtggtgaggaagacggtgtcaacaacgaaaatgctgacaaggaagacttgtacactaagcctgaacaggtttacaacgtctacaaggctttacatccaatttctccaaacttctctattgccgctgctttcggtaactgtcacggtttgtatgccggtgacattgctttgagaccagaaatcttggctgaacaccaaaagtacaccagagaacaagttggttgtaaggaagaaaaaccattattcttggttttccacggtggttctggttccactgttcaagaattccataccggtattgacaacggtgttgttaaggttaacttggacactgactgtcaatacgcttacttgactggtatcagagattacgttttgaacaagaaggactacatcatgtctccagtcggtaacccagaaggtccagaaaagccaaataagaagttcttcgacccaagagtctgggttagagaaggtgaaaagaccatgggtgctaagatcaccaagtctttggaaactttcagaactaccaacactttgtaa

SEQ ID NO: 4455 - DNA, 1005 bp, Artificial Sequence
  Optimized genes for Saccharomyces cerevisiae
atgttatccagagtcgccaagcgtgctttctcttctaccgttgctaacccatacaaggtcactgtcttgggcgctggcggtggtattggtcaaccattgtctttgttgttaaaattgaatcataaggttaccgatttgagattgtacgatttgaaaggtgctaagggtgttgccactgatttatcccacattccaactaactctgttgtcaagggcttcactccagaagagccagatggtttgaacaacgctttgaaggacaccgacatggttttaatcccagctggtgtcccaagaaagccaggtatgactagagatgacttgtttgctatcaacgcctctattgttagagacttggctgccgctactgctgaatctgctccaaacgctgctattttggttatctccaatccagtcaactccactgttccaatcgttgctcaagttttgaagaacaagggtgtttacaacccaaagaaattattcggtgtcaccactttggactccatcagagctgctagattcatttctgaagtcgaaaacactgacccaacccaagaaagagttaatgtcatcggtggtcactctggtatcaccattattccattgatctctcaaaccaaccacaagttgatgtctgacgacaagagacacgaattgattcacagaattcaatttggtggtgacgaagttgttaaggctaaaaacggtgctggttctgccaccttgtccatggctcacgccggtgccaagttcgccaatgctgttctttccggtttcaagggtgaacgtgatgttattgaaccatctttcgttgactctcctttgttcaagtctgaaggtatcgaattcttcgcttctccagttactttgggtccagacggtattgaaaagatccatccaattggtgaattatcttccgaagaagaagaaatgttgcaaaagtgtaaggaaactttaaagaagaacattgaaaaaggtgttaacttcgtcgcttccaaataa

SEQ ID NO: 4456 - DNA, 597 bp, Artificial Sequence
  Optimized genes for Saccharomyces cerevisiae
atgtctgctatgatggttaagttgggcttgaataagtctgccttattgttgaagccatctgctttctccagagccgctgctttatcttcctctagaagattgctattcaacactgctagaaccaacttcttgtccacttccccattgaagaacgttgcttctgaaatgaacaccaaggctgccattgctgaagaacaaatcttgaacaagcaaagagctaagagaccaatttctccacatttgaccatttaccaaccacaattgacctggtatttgtcttctttgcacagaatttccttggttttgatgggtctaggtttctacttattcactattttgttcggtgtttctggtttgttaggtttgggtttaaccactgaaaaggtttccaactggtaccaccaaaagttctctaagatcaccgaatggtctatcaagggttctttcgcttacttgtttgctattcactacggtggtgctatcagacacttgatctgggacactgccaaggaattgactttgaaaggtgtctacagaactggttacgctttgattggtttcaccgctgtcttgggtacttacttgttgactttataa

SEQ ID NO: 4457 - DNA, 744 bp, Artificial Sequence
  Optimized genes for Saccharomyces cerevisiae
atgccaaagttagttttagtcagacatggtcaatctgaatggaacgaaaagaacttattcaccggttgggttgatgttaagttgtctgccaagggccaacaagaagctgctagagctggtgaattgttgaaggaaaagaaggtttacccagatgtcttgtacacttccaagttgtccagagccattcaaactgctaacattgccttagaaaaagctgacagattatggattccagttaacagatcctggagattgaatgaaagacactacggtgatttgcaaggtaaggacaaggctgaaaccttgaagaagttcggtgaagaaaaattcaacacttacagaagatctttcgacgttccaccacctccaattgacgcttcttctccattctctcaaaagggtgacgaaagatacaagtacgttgacccaaacgttttgccagaaactgaatctttggctttggttattgatagattgttaccatactggcaagatgttatcgctaaggatttattatctggtaagactgttatgattgctgctcacggtaactccttgagaggtttggtcaagcacttggaaggtatttctgatgctgatattgctaaattgaacatcccaactggtatcccattggttttcgaattagatgaaaacttgaaaccatctaagccatcctactacttggatccagaagccgctgctgccggtgctgcagctgttgccaaccaaggtaaaaaataa

SEQ ID NO: 4458 - DNA, 249 bp, Artificial Sequence
  Optimized genes for Saccharomyces cerevisiae
atggttttggtccaagatttgttgcatccaactgctgcttccgaagctagaaagcacaagttgaagactttggttcaaggtccaagatcttacttcttggatgtcaagtgtccaggttgtttgaacattaccactgttttctctcacgctcaaaccgctgttacttgtgaatcttgttctaccattttgtgtaccccaaccggtggtaaggctaaattgtctgaaggtacttctttcagaagaaaataa

SEQ ID NO: 4459 - DNA, 1026 bp, Artificial Sequence
  Optimized genes for Saccharomyces cerevisiae
atgcaatacaagaagtctttggtcgcttctgctttggttgctacatctttagctgcttacgctccaaaggacccatggtctaccttaaccccatccgctacttacaaaggtggtatcactgactactcttctactttcggtattgccgttgaaccaattgctaccaccgcctcttccaaggctaagagagctgccgccatctctcagatcggcgatggtcaaatccaagctaccaccaaaaccactgcagctgccgtctcccaaatcggtgatggacaaattcaagcaaccactaagaccaaggccgctgctgtttctcaaataggtgacggtcaaattcaagctactaccaagacaacttctgccaagactaccgctgctgccgtgtcgcaaattggtgacggtcaaattcaagctactacaaaaactaaggctgctgcagtttctcaaatcggtgatggccaaatccaagccaccacaaagaccactgctgctgctgtttcccaaatcggtgacggccaaatccaagctactaccaagactactgccgctgctgtctctcaaattggtgatggtcaaatccaggccactactaacactactgttgcaccagtttcacagattactgatggtcaaattcaagctaccactttgacttccgccaccattattccatctccagctccagccccaatcaccaacggtaccgatccagtcactgctgaaacttgtaagtcctctggcaccttggaaatgaacttgaagggtggtattttgaccgacggtaagggtagaattggttctattgttgccaacagacaattccaatttgatggtccaccacctcaagctggtgctatctacgccgccggttggtccatcactccagaaggtaatttggctattggtgaccaagatactttttaccaatgtttgtctggtaacttctacaacttgtacgatgaacacattggtactcaatgtaacgctgtccacttgcaagccattgacttgttgaactgttaa

SEQ ID NO: 4460 - DNA, 555 bp, Artificial Sequence
  Optimized genes for Saccharomyces cerevisiae
atggctagatacggtgctacctctaccaacccagctaaatctgcttctgcccgtggttcttacttgagagtttctttcaagaacaccagagaaactgctcaagccatcaacggttgggaattgaccaaagctcaaaaatatttggaacaagttttggaccaccaaagagccattccattcagaagattcaactcctctattggtagaaccgctcaaggtaaggaattcggtgttaccaaggccagatggccagccaagtctgtcaagttcgttcaaggtttgttgcaaaacgctgccgctaatgctgaagccaagggtttggatgctactaagttgtacgtttcccacatccaagtcaaccaagctccaaagcaacgtagaagaacttacagagctcacggtcgtattaacaagtacgaatcttctccatctcacattgaattagttgttactgaaaaagaagaagctgttgctaaggctgctgaaaagaaggttgtcagattgacttccagacaaagaggtagaatcgccgcccaaaagagaattgctgcttaa

SEQ ID NO: 4461 - DNA, 1284 bp, Artificial Sequence
  Optimized genes for Saccharomyces cerevisiae
atgagaaagtgtaaaatcttcgtcggtaactcccacccagaactaggtaacatggtttgtcaaagattgggtattgaaccagctccatgtactttgaagaagttcgctaacggtgaaacttctgttcaaatcggtgtttccgtcagagacgaggatgtttacgtcattcaatccggttctccatccatcaacgatgatatcatggaattgttgattcttgtttctgcttgtcgtggtggcagtgctcgtaagatcaccgctgtgattccacaattcccatactccaagcaatgtaagatgaagagacacagaggtgctatcacagccagaatgttggccaacttattggttatggctggtgccgaccacgtcgtttccatggacttgcacgcttcccaaatgcaaggtttcttcaccaagccagttgacaacttgtacggtggtccatctttagccaagtggattcgtgaaaatgttgaagactacgaagatgctgttgtcgtctctaagaacccaggtggtactaagagagtcactgccttggctgattccttgaagattaacttcgctatgattcacactgaccgtagaagatccaaggacttatactctcaaaacaaggatttgcaacaattaaaattgagaaaacaatctatgttaagaaagaacagaccaatcatcagacaaggtgatcatccaaacgaagaagaaaacattattttgtctaatggtatccaaactgctagaatcagaaacggtcacgttattggtgacgacgaagctgacgatgatgaagatgccatcttagaatctgattctgaattacactctatcgatggtttggactctcatggtttaggtggtacctacgatgctgtcgactccgaagacgaagaggaaattcctgttttgtacagagaacaattgatcactttagttggtaacgttagaggtagatctgccattatcttggatgacatgatcgacagacctggttctttcatctccgctgccgaacacttggtccaaaactgtggtgctaagaaggtctacgttgttgctactcacggtattttcactggtgactgtttggaagaattggaaaagtctgacgctattgacaccattgttgttaccaacacttacccaatttctggtgaaagaattgctggctctaaaaagttggttactattgatgtctccccaatttttgctgaatgtattagaagagatcactatggtgaatccatctctgtcttgttcgactctttggctgctttgtaa

SEQ ID NO: 4462 - DNA, 1098 bp, Artificial Sequence
  Optimized genes for Saccharomyces cerevisiae
atgaagttgtctgccttgttggctttgtctgcttccactgctgttttggccgccccagctgtccaccactctgacaaccatcatcacaacgacaagagagctgttgttaccgttactcaatacgttaatgctgacggtgccgtcgttattccagccgccaccaccgctacttcagctgccgctgatggtaaggttgaatctgttgctgctgccactaccactttgtcaagcactgctgctgctgctactacttctgctgcagcttcttcctcctcttcctcttcttctagctcttcttcatccagctccgttggttctggtgacttcgaagatggtaccatttcttgctctgatttcccatccggccaaggtgccgtttctttggactggttaggtttgggtggttgggcctctatcatggacatgaacggtaacactgccacatcttgtcaagatggatactattgttcatatgcttgttctccaggttacgctaagacccaatggccatctgaacaaccttccgacggtagatccgtcggtggtttatactgtaagaacggtaaattgtacagatctaacaccgataccaactccttgtgtgttgaaggtcaaggctccgcccaagctgtcaacaaagtttccggttctattgctatctgtggtactgactacccaggctccgaaaacatggttgttccaactgttgtgggtgctggttcttctcaaccaatcaacgttatcaaagaagactcttactaccaatggcaaggtaagaagacttccgctcaatattatgttaacaatgccggtgtttcagtcgaagatggttgtatctggggtactgaaggttccggtgttggtaactgggctccagttgtcttgggtgctggttacactgatggtattacttacttgtccatcatcccaaacccaaacaacaaggaagctccaaatttcaacatcaagattgtcgctaccgacggttctactgtcaatggcgcctgttcctacgaaaatggtgtctactctggttcaggttccgatggctgtaccgtctctgtcacctctggtagtgctaacttcgttttctactaa

SEQ ID NO: 4463 - DNA, 264 bp, Artificial Sequence
  Optimized genes for Saccharomyces cerevisiae
atggaaaacgacaagggtcaattggttgaattgtacgttccaagaaagtgttctgctaccaacagaatcatcaaggctgatgatcatgcttctgttcaaatcaacgttgctaaggttgacgaagaaggtagagctattccaggtgaatacgttacttacgctttgtctggttacgtcagatctagaggtgaatctgatgactctttgaacagattggctcaaaacgatggtttgttgaagaacgtctggtcttactctcgttaa

SEQ ID NO: 4464 - DNA, 1920 bp, Artificial Sequence
  Optimized genes for Saccharomyces cerevisiae
atgtccaaggctgttggtatcgacttgggtaccacttactcctgtgttgctcacttttctaacgacagagttgacattattgctaatgatcaaggtaacagaaccaccccatctttcgtcggtttcaccgatactgaaagattgatcggtgatgctgctaagaaccaagctgctatgaaccctgctaacactgttttcgacgccaagagattaattggtcgtaacttcaacgatccagaagttcaaggtgatatgaagcatttcccattcaagttgattgatgtcgacggtaagccacagattcaagtggaattcaagggtgaaaccaagaatttcactccagaacaaatctcttccatggtcttaggtaagatgaaagaaactgccgaatcttacttgggtgctaaagttaacgatgccgttgttaccgtcccagcttacttcaacgactctcaaagacaagctaccaaagatgctggtactattgccggtttgaacgttctaagaatcatcaacgaacctaccgccgccgctattgcctacggtttagataaaaagggcaaggaagaacacgttttgatcttcgatttgggcggtggtacttttgacgtctctttgttgtccatcgaggatggtattttcgaagtcaaggccactgctggtgacactcacttgggtggtgaagatttcgacaaccgtttggtcaaccacttcatccaagaattcaagagaaagaacaagaaggacttgagtaccaaccaaagagctttgagaagattgagaactgcttgtgaaagagccaagcgtactttatcctcttctgctcaaacttctgttgaaatcgattccttgtttgaaggtattgacttctacacttccattaccagagctagattcgaggaattgtgtgctgatttattcagatccactttggacccagttgaaaaggttttaagagacgctaagttggataagtcccaagtcgatgaaattgttttggttggtggttctactagaattccaaaggtccaaaagttagtcactgactactttaatggtaaggaaccaaacagatctattaacccagatgaagccgtcgcttatggtgcagctgttcaagctgccattttgactggtgacgaatcctccaaaactcaagatttgttattgttggacgttgctccattgtctttaggtattgaaacagcaggtggtgttatgactaaattaatcccaagaaactccaccattccaaccaagaagtctgaagtcttctctacctacgctgacaatcaaccaggtgtcttgattcaagtttttgaaggtgaacgtgctaagactaaggacaacaacttgctaggtaagttcgaattatctggtatcccaccagctccaagaggtgttccacaaattgaagttactttcgatgttgattctaacggtatcttgaatgtttctgccgtggagaaaggtaccggtaaatccaacaagatcaccatcactaatgacaagggtagactatccaaggaagatatcgaaaaaatggttgcagaagctgaaaaattcaaagaagaagacgaaaaggaaagtcaacgtattgcttctaagaaccaattagaatctatcgcttactctttgaaaaacaccatttctgaggctggtgacaaattggaacaagcagacaaggatgctgtcaccaagaaagctgaagaaactatcgcttggttagactccaatactaccgctactaaggaagaatttgatgaccaattgaaggagttgcaagaggttgccaacccaatcatgtctaaattgtaccaagccggtggtgccccagagggtgctgctccaggcgggttcccaggtggtgctcctccagcccctgaagctgaaggtccaactgtcgaagaagttgattaa

SEQ ID NO: 4465 - DNA, 801 bp, Artificial Sequence
  Optimized genes for Saccharomyces cerevisiae
atgttaaacgtcttgttgagacgtaaggctttctgtttggtcaccaagaaaggtatggctaccgctactactgctgctgccacccacactccaagattgaagactttcaaggtttacagatggaacccagatgaaccatctgctaagccacatttgcaatcctaccaagttgatttgaacgactgtggcccaatggttttggatgctttgttgaagatcaaggacgaacaagattctaccttgaccttcagaagatcctgtagagaaggtatttgtggttcttgcgctatgaacattggtggtagaaacactttggcctgtatctgtaagattgatcaaaacgaatccaagcaattgaaaatctacccattgccacacatgttcattgtcaaggacttggttccagacttaaccaacttctaccaacaatacaagtccatccaaccatacttacaaagatcttctttcccaaaggatggtactgaagttctacaatctattgaagacagaaagaagttggacggtttatacgaatgtattttgtgtgcttgttgttctacttcttgtccttcttactggtggaaccaagaacagtacttgggtccagctgttttgatgcaagcttaccgttggttgattgactctagagaccaagccactaagaccagaaaggccatgttgaacaactccatgtctttgtacagatgtcacaccatcatgaactgtactagaacttgtccaaagggtttgaatccaggtttggctattgctgaaattaagaagtctttagcttttgcttaa

SEQ ID NO: 4466 - DNA, 771 bp, Artificial Sequence
  Optimized genes for Saccharomyces cerevisiae
atggctccaggtaagaaggtcgccccagctccatttggtgctaagtctaccaagtccaacaaggccaagaacccattgacccactctactccaaaaaacttcggtattggtcaagccgttcaaccaaagagaaacttgtccagatacgtcaaatggccagaatacgttagattgcaaagacaaaaaaagatcttgtctatcagattgaaggttccaccaaccattgcccaattccaatacactttggacagaaacactgctgctgaaactttcaagttgttcaacaaatacagaccagagactgccgccgaaaagaaagaaagattaactaaggaagctgctgccattgctgaaggtaaatccaagcaagatgcttctccaaagccatatgctgtcaagtacggtttgaaccacgttgtctctttgattgaaaacaagaaggcaaaattggtcttgatcgccaacgatgttgacccaatcgaattggttgttttcttgccagccttgtgtaagaagatgggtgtcccatacgctatcatcaagggtaaggctagattgggtactttagttaaccaaaagacttccgctgttgctgctttgactgaagtcagagctgaagacgaagccgctttggctaagcttgtttccactattgacgctaactttgctgacaagtacgatgaagttaagaagcactggggtggtggtatcttaggtaacaaggctcaagctaaaatggacaaaagagccaagacctctgactctgcttaa

SEQ ID NO: 4467 - DNA, 432 bp, Artificial Sequence
  Optimized genes for Saccharomyces cerevisiae
atgtctagatctggtgttgctgtcgctgatgaatctttgactgccttcaacgatttgaagttgggtaagaagtacaagttcatcttgttcggtttgaacgatgctaagactgaaattgttgttaaggaaacttctaccgacccatcttacgacgctttcttggaaaagttgccagaaaacgactgtttgtacgctatctacgatttcgaatacgaaatcaacggtaacgaaggtaagagatccaagatcgttttcttcacttggtctccagacactgctccagttagatcaaagatggtttatgcttcttctaaggatgccttgagaagagctttgaatggtgtctctactgatgttcaaggtactgacttctctgaagtttcttatgactctgttttggaaagagtttccagaggtgctggttctcattaa

SEQ ID NO: 4468 - DNA, 3618 bp, Artificial Sequence
  Optimized genes for Saccharomyces cerevisiae
atgagaacctttactgacttcgtctccggtgctcctattgttagatccttgcagaaatctactatcagacgttatggttacaatttggctccacacatgtttttgttgttgcacgtcgatgaattgtctatcttttccgcttaccaagcttctttgccaggtgaaaagaaagttgatactgaaagattaaagagagacttgtgtccacgtaagccaatcgaaatcaagtacttctcccagatctgtaacgatatgatgaacaagaaggacagactgggtgacgttttggctaccgcccaaagaattagaagaagatacaacaagaacggttcctctgagccaagattgaagactttggacggtttgacctctgaaagatggattcaatggttgggcttggaatccgactaccattgttctttctcttctaccagaaatgctgaagatgttgttgcaggtgaagctgcttcttccgatcatgaccaaaagatctccagagttaccagaaaaagaccaagagaaccaaagtccaccaatgacattttggttgctggtcaaaagctatttggttcttctttcgaattccgtgatttacatcaactaagattgtgtcacgaaatttacatggccgataccccatctgttgccgttcaagccccaccaggctatggtaaaactgaattgttccatttgccattaattgctttggcttctaaaggtgatgtcaagtatgtttcctttttatttgttccatacactgttcttttggctaactgtatgatcagactaggtagatgtggttgtttgaacgtcgctccagtcagaaacttcatcgaggaaggctgtgatggtgtcactgatttgtacgtcggtatctacgatgatttggcctccactaacttcaccgatagaattgccgcatgggaaaacatcgtggaatgtaccttcagaaccaacaacgttaaattgggttacttgattgtcgacgaatttcacaactttgaaactgaagtttaccgtcaatctcaattcggtggtattactaacttagatttcgacgcttttgaaaaagctattttcttgagtggtactgctccagaagctgttgctgatgctgccttacaaagaatcggtttgactggtcttgctaaaaagtctatggatatcaacgagttgaagcgttccgaagatttgagcagaggtttatcctcctacccaactagaatgttcaacttgatcaaagaaaagtcagaagttccattgggtcacgttcacaagatttggaagaaggttgaatcccaaccagaagaagcattgaaattgctattagctttgtttgagattgaaccagaatccaaggccatcgttgtcgcctctactaccaacgaagtcgaagaattagcttgttcctggagaaaatactttagagtcgtctggatccacggtaagttgggtgccgctgaaaaggtttctagaactaaggagtttgtcaccgacggttccatgcgtgtcttgattggtaccaagttagttactgaaggtattgacatcaagcaattaatgatggttatcatgttggacaatagattaaacattattgaattaatccaaggtgtcggtagattgagagatggtggtttgtgttacctattgtccagaaagaattcttgggctgctagaaacagaaagggtgaattgcctccaattaaagaaggttgtattaccgaacaagttagagaattctacggtttggaatctaagaagggtaagaaaggtcaacatgttggttgttgtggttcaagaacagacttgtctgctgacactgtcgaattgatcgaacgtatggaccgtttggctgagaaacaagctactgcctccatgtccattgttgctttaccatcatccttccaagaatctaattcatctgatcgttgtagaaagtactgtagctctgacgaagactcaaacacttgtatccatggttctgctaacgcatccaccaatgccacaaccaacagttccactaatgcaaccactactgcctcaacaaacgtccgtacttctgccaccaccaccgcttccatcaacgttcgtacatctgccactaccaccgaaagtaccaactcctcaactaatgctaccactactgcatctacaaatgtcagaacttctgctactaccaccgcttctattaacgttagaacttcagctacaacgacagagtccacaaactctaacactagtgctaccactactgaatctactgactccaatacttccgctactacaacagaaagcactgattccaacacctccgccactaccacagctagcaccaactcttctaccaacgccaccactactgcttccactaactcctctaccaacgctactaccactgaatctaccaacgcttcagccaaggaagatgccaacaaagatggtaacgctgaagacaacagattccacccagtgaccgatattaataaggaatcgtacaagagaaagggttctcaaatggttttattggagagaaagaagttgaaggctcaattcccaaacaccagtgaaaacatgaatgttctacaatttttgggtttcagatctgatgaaattaagcacttattcttatacggtatcgatatctatttctgtcctgaaggtgttttcactcaatacggtctatgtaagggatgtcaaaagatgttcggtctttgtgtttgttgggctggccaaaaggtctcttacagaagaatggcttgggaggctttggcagttgaaagaatgttaagaaacgacgaagaatataaggaatacttagaggatattgaaccttaccacggtgacccagttggttatttgaagttcttctctgtcaagagaggtgaaatctactctcaaatccaaagaaactacgcttggtacctggctatcactagaagaagagaaaccatttccgttttggattctactcgtggtaagcaaggctcccaagtctttagaatgtctggtagacaaatcaaggaactatactacaaggtctggtctaacttgagagaatcaaagaccgaggtcttgcaatattttttgaactgggatgaaaagaagtgtcgtgaagaatgggaagctaaggatgacaccgtcttcgttgaagccttggaaaaagttggtgttttccaacgtttgcgttctatgacttctgctggtttgcaaggtccacaatacgttaagttgcaattttctagacaccacagacaattgagatctcgttacgaattatctttaggtatgcacttgagagatcaattggctctaggtgttactccatccaaggttcctcattggactgctttcttgtcaatgcttattggtttattttacaacaagactttcagacaaaaattagaatacttgttggaacaaatttctgaagtttggttattacctcactgggttgacttagccaatgtagaagttttggccgccgacaacacaagagttccattgtacatgttgatggtcgctgtccacaaggaactggactctgacgacgtcccagatggcagatttgacatcatcttgttatgtagagactcttcccgtgaagtcggagaataa

SEQ ID NO: 4469 - DNA, 252 bp, Artificial Sequence
  Optimized genes for Saccharomyces cerevisiae
atggctgaccaagaaaactctccattgcacactgttggtttcgatgctagattcccacaacaaaaccaaaccaagcattgttggcaatcttacgttgactaccacaagtgtgttaacatgaagggtgaagatttcgctccatgtaaggttttctggaagacttacaacgctttgtgtccattggactggattgaaaaatgggatgatcaaagagaaaagggtatttttgctggtgacatcaactccgattaa

SEQ ID NO: 4470 - DNA, 312 bp, Artificial Sequence
  Optimized genes for Saccharomyces cerevisiae
atggttactcaattcaagactgcttctgaattcgactctgctattgcccaagataaattggttgtcgttgacttttacgctacctggtgtggtccatgtaagatgatcgctccaatgattgaaaagttctccgaacaatacccacaagctgatttctacaagttggatgttgatgaattgggtgatgtcgctcaaaagaacgaagtctccgctatgccaactttgttgttattcaaaaacggtaaggaagttgctaaggttgttggtgctaacccagctgctatcaagcaagccattgctgccaacgcttaa

SEQ ID NO: 4471 - DNA, 1692 bp, Artificial Sequence
  Optimized genes for Saccharomyces cerevisiae
atgtctgaaatcactttgggtaagtacttgtttgaaagattgaagcaagttaacgtcaacactgttttcggtttgcctggtgacttcaatttatctttgttggacaaaatttatgaagttgaaggtatgagatgggctggtaacgccaatgaattgaatgctgcttacgccgccgatggttacgctagaatcaagggtatgtcttgtatcattactaccttcggtgtcggtgaattatctgctttgaacggtattgccggttcttatgctgaacacgttggtgtcttgcatgttgtcggtgttccatctatctctgcccaagccaaacaattattgttacatcacactttgggtaatggtgattttaccgttttccacagaatgagtgctaacatctccgaaactaccgctatgattaccgatatcgctactgccccagctgagattgacagatgtattagaaccacttatgtcactcaaagaccagtttatttgggtttacctgctaatttggttgacttaaacgttccagccaagctattgcaaaccccaattgatatgtccttaaagccaaatgatgccgaatctgaaaaggaagtcatcgataccatcttggctttagtcaaggatgctaaaaacccagttatcttagctgatgcttgttgttccagacacgatgtcaaagctgaaactaagaaattgatcgacttgactcaattcccagctttcgttactccaatgggtaaaggttctattgatgaacaacatccaagatatggtggtgtttacgttggtaccttgtctaagccagaagttaaggaagctgttgaatccgctgatttgattttgtctgttggcgctctactatctgatttcaacaccggttcattctcctactcttacaagaccaagaacattgtcgaattccattctgaccacatgaagatcagaaacgccactttcccaggtgttcaaatgaaattcgtcctacaaaagttgttgaccaccattgctgacgccgctaagggttataagcctgttgctgtgccagccagaactcctgccaacgcagctgtcccagcttctactccattgaagcaggaatggatgtggaaccaattgggtaacttcttgcaagaaggtgatgttgttattgctgaaacaggtacttctgcttttggtatcaaccaaactacatttccaaacaatacttacggtatttctcaagtcttatggggttccatcggtttcactactggtgctactttaggtgctgcctttgctgctgaagaaattgacccaaagaagagagtcattttattcattggtgacggttctttgcagttaactgtccaagaaatttccaccatgatccgttggggtttgaaaccatacttatttgttttgaacaacgatggttacactatcgaaaaattaattcacggtccaaaggctcaatacaacgaaattcaaggttgggatcatttgtccttgttgccaacttttggtgccaaggactacgaaacccacagagttgccaccactggtgaatgggacaagttaacccaagataagtctttcaacgacaactccaagattcgtatgattgaaatcatgttgccagtcttcgacgctccacaaaacttggtcgagcaagctaagttgactgctgctaccaacgctaagcaataa

SEQ ID NO: 4472 - DNA, 1098 bp, Artificial Sequence
  Optimized genes for Saccharomyces cerevisiae
atggacttggtcttggaagttgctgaccactacgttttggatgatttgtacgccaaggtcttgcctgcttccttggctgctaacatcccagtcaagtggcaaaagttgttgggcttgaattctggtttctctaactctactatcttacaagaaactttgaactccaagaatgctgttaaggaatgtagaagattctacggtcaagttccattcttgttcgatatgtctaccacttcttttgcctccttattgccaagatcttccattttgagagaattcttgtctttatgggttattgttaccattttcggtttgttgttatatttattcactgcttctttgtcatacgtcttcgttttcgacaagtctatcttcaaccatcctagatacttgaagaaccaaatggctatggaaattaaattggccgtttctgctattccatggatgtccatgttgaccgtcccatggttcgtcatggaattgaacggtcactctaagttatacatgaagattgactacgaaaaccacggtgtcagaaagttgattattgaatactttactttcattttcttcactgactgtggtgtttacttagctcacagatggttacactggccaagagtttatagagctttgcataagccacatcataaatggttggtttgtaccccatttgcttctcattctttccatccagttgacggttttttgcaatctatttcctaccacatttacccattgattttacctttgcacaaggtttcctatttgatcttgtttacctttgttaacttctggactgttatgattcacgatggtcaatacttgtccaacaacccagctgtcaatggtaccgcttgtcacactgtccaccacttgtacttcaactacaactatggtcaattcaccaccttgtgggacagattgggtggttcttacagaagaccagatgactctttgtttgacccaaagttaagagacgctaaggaaacctgggatgctcaagtcaaagaagtcgaacacttcatcaaggaagttgaaggtgacgacaacgatagaatttatgaaaatgatccaaacaccaagaagaacaactaa

SEQ ID NO: 4473 - DNA, 1788 bp, Artificial Sequence
  Optimized genes for Saccharomyces cerevisiae
atgccaaccgtttccgtcaacaagcaacaattgttcgacttattgggtaagaactacacttctcaagaatttgacgaattgtgtttcgaattcggtatggaaatggacgaagacactaccgaagaagctttgaaaactggtgaagaacctgaattaaagttggatatttctgccaacagatatgacttgttgtgtatcgaaggtatttcccaaagtttgaacgaatatttggaaagaaaggaacgtccagactataaattgtccaagccaactactaagttgatcatcgacaaatctactgaacaaatcagacctttcgccaccgctgctgtcttaagaaacatcaagttgaatgaaaagtcctacgcttctttcattgccttgcaagataagctacatgctaacttgtgtagaaacagatctttggttgctatgggtactcacgatttagattctattgaaggtccattccactacagagctttgcctccaaaggacattaagttcgttcctttgaaccaaacccaagagttcaccggtgacaagttgattgaattctacaagtctccagaacaaaagaataatatcggtagatacgttcacattattgaggattccccagtcttccctgttatcatggactctaaggacagagtttgttctttgccaccattaattaacagtgaacattctaagatctctgttaacactagaaatattttgattgacatcactgctactgacaagaccaaggctgaaatcgttttaaacattttgaccaccatgttctctcgttactgtgatgagccattcactgttgaaccagtggaaattgtttctgaacacaacggtcaatctagattggctccaaacttcaacgatagaatcatggatgtctccatcaagtacatcaactcctgtttaggtttggaccaatctgctgatgaaattgctcattgtttgaagaagatgtctttacacgccgttcaatccaaggaagacaaggatatcttacatgttgatattccagttaccagaccagatatcttgcacgcttgtgacatcatggaagatgctgctgttggttatggtttcaacaacttaccaaagggtgaaaaattgtctaacgctaatttcatcgccaagccattgccaatcaataaggtctctgacattttcagagtcgcctcttctcaagctacctgggttgaagtcttgccattgactttatgctctcatgatgaaaacttcaaattcttgagacaatccgacaacggtgatttggccgtcaaattagctaacccaaagaccttggaataccaagttgtcagaaccactttgttacctggtatcttgaagactgtcaaggaaaatagaaagcactctctaccaattaaagtttttgaaactggtgacgttgttttcaaggatgataaattagaaagaaaagcttacaacgaaagacactgggctgctatctacgtcggtaagaactctggttttgaaatcattcaaggtttactaggtaaaattatgcaaactttcagaactgaatggatcgctgactacggtgccgccgcttccggtagaggttactggattgaagaagatgactccgttaagacttacttcccaggtcgtggtgctaaggttatgtttagatccaaagaaggtgctgaaccaaaacaaattggtcacttgggtgttttgcatccagaagtcatgatgaactttgatgttccatttgctgcctccttcgtcgaagttaatgctgaagttttcttataa

SEQ ID NO: 4474 - DNA, 366 bp, Artificial Sequence
  Optimized genes for Saccharomyces cerevisiae
atggctccaaacacttccagaaagcaaaagattgccaagactttcactgtcgatgtctcttctccaactgaaaacggtgttttcgacccagcttcttacgctaaatatttgattgaccacatcaaggttgaaggtgctgttggtaacttgggtaatgctgtcactgttaccgaagatggtactgttgtcaccgttgtttccactgctaagttctctggtaagtacttgaagtacttgactaagaaatacttaaagaagaaccaattgagagactggattagattcgtttctaccaagaccaacgaatacagattggctttctaccaagttactccagaagaagacgaagaagaggatgaagaataa

SEQ ID NO: 4475 - DNA, 666 bp, Artificial Sequence
  Optimized genes for Saccharomyces cerevisiae
atggctcgtcgtccagctagatgttacagataccaaaagaacaagccatacccaaagtctcgttacaacagagctgttccagattccaagatcagaatttacgatttgggtaaaaagaaggctactgttgatgaatttccattgtgtgttcatttggtctctaacgaattggaacaattgtcctctgaagctttggaggctgcccgtatctgtgctaacaagtacatgactaccgtttctggtagagatgctttccacttgagagttcgtgtccacccattccatgttttgagaatcaacaagatgttgtcttgtgccggtgctgatagattgcaacaaggtatgagaggtgcttggggtaagcctcacggtttggctgctagagtcgatattggtcaaatcattttctctgttagaaccaaggactccaacaaagatgtcgttgttgaaggtttaagaagagccagatacaagttcccaggtcaacaaaagattattttgtctaagaaatggggtttcaccaacttggacagaccagaatacttgaagaagagagaagctggtgaagttaaggatgatggtgcctttgtcaaattcttgtcaaagaagggttctttggaaaacaacattagagaattcccagaatattttgctgctcaagcttaa

SEQ ID NO: 4476 - DNA, 531 bp, Artificial Sequence
  Optimized genes for Saccharomyces cerevisiae
atgtctgatttggttaacaagaaattcccagctggtgactacaagttccaatacattgctatttctcaatctgatgctgactctgaatcttgtaagatgccacaaactgtcgaatggtccaagttgatttccgaaaataagaaggttatcatcactggtgctccagccgccttctctccaacttgtaccgtctctcacattccaggttacatcaactacttggatgaattggtcaaggaaaaggaagttgaccaagttattgtcgtcactgttgacaacccattcgctaaccaagcttgggctaagtctttgggtgttaaggacaccactcacatcaagtttgcttctgacccaggttgtgctttcaccaagtccattggtttcgaattagctgttggtgatggtgtctactggtctggtagatgggctatggttgttgaaaacggtattgttacttacgctgctaaagaaaccaaccctggtactgatgttaccgtttcttctgttgaatccgttttggctcacttgtaa

SEQ ID NO: 4477 - DNA, 402 bp, Artificial Sequence
  Optimized genes for Saccharomyces cerevisiae
atgcaattctctaccgttgcctctattgctgctgtcgctgctgttgcttctgccgcagctaacgttaccactgctactgtttctcaagaatctactactttggtcaccattacttcttgtgaagatcatgtttgttctgaaactgtctctccagctttggtttccaccgctaccgtcactgttgatgatgttatcactcaatacaccacctggtgtccattgactactgaagccccaaagaacggtacttccactgccgctccagttactagtaccgaagctccaaaaaacactacctctgctgcaccaactcactctgttacttcttacactggtgctgctgctaaggctttgccagccgccggtgctctgttggctggtgccgctgccttgttgttataa

SEQ ID NO: 4478 - DNA, 822 bp, Artificial Sequence
  Optimized genes for Saccharomyces cerevisiae
atgtctaacccattcgacttgttgggtaacgatgttgaagacgctgatgttgttgtcttgccacctaaggaaatcgttaaatctaatacttcttccaagaaggccgatgtcccaccaccatctgctgacccatccaaggctcgtaaaaaccgtccaagaccatctggtaacgaaggtgccatcagagacaaaactgccggtagaagaaacaacagatctaaggacgtcactgactctgctactaccaaaaagtccaacactagaagagctactgatagacactctagaactggtaaaaccgacactaagaagaaggttaaccaaggttggggtgatgacaagaaggaattatccgctgaaaaagaagcccaagctgatgctgctgcagaaattgctgaagatgctgccgaagctgaagatgctggtaagccaaagactgctcaattatctttgcaagattatttgaaccaacaagccaacaatcaattcaacaaggttccagaagctaagaaagttgaattggacgctgaaagaattgaaaccgctgaaaaggaggcttacgttccagctaccaaggtcaagaacgttaagtctaagcaattgaagaccaaggaatacttggaattcgatgccactttcgtcgaatctaacaccagaaagaacttcggtgacagaaataacaactccagaaacaactttaacaacagacgtggtggtagaggtgctagaaagggtaataacactgctaacgccaccaactctgccaatactgttcaaaagaatagaaacattgacgtttccaacttgccttccttggcttaa

SEQ ID NO: 4479 - DNA, 1089 bp, Artificial Sequence
  Optimized genes for Saccharomyces cerevisiae
atgcgttctttaaacactttgttgttgtccttgttcgttgctatgtcttctggtgccccattattgaagatcagagaagagaagaactcctctttgccatccatcaagattttcggtactggtggtaccattgcctccaagggctctacttctgctaccactgctggttactccgttggtttaactgttaatgatttaattgaagccgttccatctctagctgaaaaggctaacttggactacttgcaagtttctaacgtcggttccaacagtttgaactacactcatttgatcccattgtaccatggtatttccgaagctttggcctctgatgattacgccggtgctgttgttactcacggtactgacaccatggaagaaactgctttctttttggatttgactatcaactctgaaaaaccagtttgtatcgccggtgccatgagaccagctactgccacttccgctgacggtccaatgaacctttaccaagctgtctctattgctgcttctgaaaagtctttgggtagaggtacaatgattaccttgaacgacagaatcgcttccggtttctggaccaccaagatgaatgccaactcattagacactttcagagctgatgaacaaggttacttaggttacttctctaacgatgacgttgaattctactacccaccagtcaagccaaacggttggcaattcttcgatatttctaatttgaccgacccaagtgaaattcctgaagttatcatcttgtattcttaccaaggtttgaacccagaattgattgttaaggccgtcaaggacttgggtgctaagggtatcgttttggctggttctggtgctggttcttggactgccaccggttccattgttaacgaacaattatacgaagaatatggtattccaattgtccactctagaagaactgcagatggtaccgtccctccagacgatgctccagaatacgctattggtagtggttatttgaatccacaaaagtccagaattttgttacaattgtgtttgtactctggctacggtatggaccaaattagatctgttttctccggtgtttacggtggttag

SEQ ID NO: 4480 - DNA, 459 bp, Artificial Sequence
  Optimized genes for Saccharomyces cerevisiae
atgcaaatcttcgtcaagactttgactggtaagaccattactttagaagttgaatcttctgacactattgacaacgttaagtccaagatccaagacaaggaaggtattccaccagaccaacaaagattgattttcgccggtaagcaattggaagatggtagaactttgtccgactacaacattcaaaaggaatccaccttgcacttggttttgcgtttgagaggtggtggtaagaagagaaagaaaaaggtctacactactccaaagaagatcaagcataagcacaagaaggttaaattggctgtcttgtcttactacaaggttgatgctgaaggtaaagttaccaagttgagaagagaatgttctaacccaacttgtggtgctggtgttttcttggccaaccacaaggacagattgtactgtggtaagtgtcactctgtttacaaagtcaacgcttaa

SEQ ID NO: 4481 - DNA, 267 bp, Artificial Sequence
  Optimized genes for Saccharomyces cerevisiae
atgggtaagggtactccatctttcggtaaaagacacaacaagtctcacactttgtgtaacagatgtggtcgtagatccttccatgttcaaaagaagacttgttcttcttgtggttacccagctgctaagaccagatcttacaactggggtgctaaggccaagagaagacataccactggtaccggtagaatgagatacttgaagcacgtttccagaagattcaagaacggtttccaaactggttctgcctccaaggcttctgcttaa

SEQ ID NO: 4482 - DNA, 3135 bp, Artificial Sequence
  Optimized genes for Saccharomyces cerevisiae
atgtccgattctcaacaatctatcaaggttttggaagaattgttccaaaagttgtccgttgccactgctgacaacagacacgaaatcgcctccgaagttgcatctttcttgaacggtaacatcatcgaacacgatgttcctgaacatttcttcggtgaattggccaagggtattaaggataagaagaccgctgccaacgccatgcaagccgttgctcatatcgctaaccaatccaacttgtctccatctgttgaaccatacatcgttcaattagttccagccatttgtaccaatgccggtaacaaagataaagaaattcaaagtgttgcttctgaaactttgatttctattgtcaatgctgttaacccagtcgccatcaaagccttgttgcctcacttgactaacgctattgtggaaaccaacaaatggcaagaaaagatcgctattttagccgccatttccgctatggttgatgctgctaaagaccaagtcgctttgagaatgccagaattgattcctgttttatccgagactatgtgggataccaagaaggaagtgaaggccgctgctactgccgcaatgacaaaggctaccgaaactgttgataacaaggatatcgaaagatttattccatctttgatccaatgtatcgctgatcctactgaagtaccagaaactgtccacctattgggtgccactacctttgttgctgaagttactccagctacactatccatcatggtcccattattatcaagaggtttaaatgagagagaaacaggtattaagagaaagagtgctgtcatcattgacaacatgtgtaagttggttgaagaccctcaagttatcgctccattcttaggtaagttgttaccaggcttgaaatccaattttgctactattgctgacccagaagctagagaagttaccttaagagccttaaaaactttgcgtagagttggtaacgttggtgaggatgatgccatcccagaagtttctcacgctggtgacgtttctaccaccttgcaagttgttaatgaattgttgaaggacgagaccgttgccccaagattcaaaattgttgtcgaatatattgctgctatcggtgccgatttgatcgatgaaagaattattgatcaacaagcttggttcacccatattaccccttacatgaccattttcttgcatgaaaaaaaggccaaggacatcttggatgagttcagaaagagagctgtcgacaacattccagttggcccaaacttcgatgacgaagaagatgaaggtgaagacttgtgtaactgcgaattctccttggcttacggtgctaagattcttttaaacaagacccaattgagattgaagcgtgccagaagatatggtatctgtggtccaaatggttgtggtaaatctactttgatgagagctatcgctaacggtcaagtggatggtttcccaactcaagaagagtgcagaactgtttacgttgaacacgacattgacggtacccactctgacacttccgtcttagatttcgttttcgaaagtggtgtcggtaccaaggaagcaatcaaggacaagttaattgaatttggttttactgacgaaatgattgctatgccaatctctgccctatctggtggttggaagatgaaattggctttagctcgtgctgtgttgagaaacgctgatattttgttgctagacgaaccaaccaaccatttagacaccgtcaacgtcgcatggttggtcaactatttgaacacttgtggcatcacatccattactatctcccatgactctgtttttttggacaatgtttgtgaatacatcatcaactacgagggtttgaaattacgtaagtacaagggcaacttcactgaatttgtcaagaagtgtccagctgctaaggcttatgaagaactttctaacactgatttggaattcaagtttccagagccaggttacttagaaggtgttaagactaagcaaaaggctattgtcaaggtcactaatatggaattccaatacccaggtacttctaagccacaaatcaccgatatcaactttcaatgttcattatcttcccgtattgccgtcattggtcctaatggcgctggtaagtccactttaatcaatgtcttgaccggtgaattattgccaactagtggcgaagtctacactcacgaaaactgtagaatcgcctacattaaacaacatgctttcgctcacattgaatctcatttggacaagactccttccgagtatatccaatggagattccaaactggtgaagatcgtgaaaccatggacagagctaatagacaaattaacgaaaacgatgccgaagccatgaacaagatcttcaagattgaaggtaccccaagaagaattgctggtatccattccagaagaaagttcaagaacacctacgaatacgaatgttcctttttactaggtgaaaatattggtatgaagtctgaaagatgggttccaatgatgtctgtcgataatgcttggattccacgtggtgaattagtcgaatcccactccaagatggttgctgaagttgacatgaaggaagctctagcttccggccaattccgtccattgaccagaaaagaaattgaggagcattgttctatgttgggtctagatccagaaatcgtctcccactctagaatcagaggtttgtcaggcggtcaaaaagttaaactagtcttggctgccggtacttggcaaagaccacatttgattgttttggacgaacctaccaactacttggatagagactcccttggtgctttgtctaaagctttgaaggagtttgaaggtggtgttattattatcactcattctgctgagttcactaaaaacttaactgaggaagtctgggctgttaaggatggtagaatgactccatccggtcacaactgggtttccggtcaaggtgctggtccaagaattgaaaagaaggaagatgaagaagacaaattcgacgctatgggtaataaaatcgcaggtggtaagaagaagaagaaattgtcctctgctgaactaagaaagaaaaaaaaggaacgtatgaagaagaagaaagagttgggtgatgcttacgtctcttctgatgaagaattctaa

SEQ ID NO: 4483 - DNA, 1719 bp, Artificial Sequence
  Optimized genes for Saccharomyces cerevisiae
atgttacgttcttctgttgttagatccagagctactttaagaccattgttgagaagagcttactcttcccacaaggaattgaaattcggtgttgaaggccgtgcttccttgttaaagggtgtcgaaactttggctgaagctgttgctgctaccttgggtccaaaaggtagaaacgttttaattgaacaaccatttggtccaccaaagattaccaaggatggtgttactgttgctaagtccattgttttgaaggacaagttcgaaaacatgggtgccaagctattacaagaggttgcatctaagaccaacgaagccgccggtgacggtaccacttccgctaccgttttgggtcgtgccattttcaccgaatctgtcaagaatgttgctgctggttgtaacccaatggacttgagaagaggttctcaagtcgcagttgaaaaggttattgaattcttgtctgctaacaagaaggaaattaccacctctgaggaaattgctcaagttgccaccatttctgccaacggtgattctcacgttggtaaactattggcaagtgctatggaaaaagtcggtaaggaaggtgtgatcactattagagaaggtagaactttggaagatgaattagaagttaccgagggtatgagattcgacagaggtttcatctctccatacttcattactgacccaaagtcttccaaggtcgaatttgaaaaaccattattattgttgtccgaaaagaagatctcctctattcaagatatcttgccagctttggaaatctccaaccaatctagaagaccattgttgatcattgccgaagatgttgatggtgaagctttagctgcttgtatcttgaacaaattgcgtggtcaagttaaagtttgtgctgtcaaggctcctggtttcggtgacaacagaaagaacactatcggtgacattgctgtcttgaccggtggtactgttttcactgaagaattggatttgaagccagaacaatgtaccatcgaaaacttgggctcttgtgactctatcaccgtcactaaagaagacactgtcattttgaatggttctggcccaaaggaggccatccaagaaagaattgagcaaatcaagggctccatcgatattactaccactaactcttacgaaaaggaaaagttgcaagaaagattggctaaattatctggtggtgttgccgttatcagagttggtggtgcttctgaagtggaagtcggtgagaagaaagaccgttatgatgatgctttgaacgctaccagagccgctgttgaagaaggtatcttaccaggcggtggtactgctttggttaaggcctcccgtgtcttagatgaagtcgttgtggataactttgaccaaaagttaggtgttgacatcatcagaaaggctatcactagacctgccaagcaaattattgaaaatgctggtgaagaaggttccgtcatcattggtaagttgattgacgaatatggtgatgacttcgctaagggttacgatgcctctaaatctgaatacactgatatgttggccactggtattattgatccattcaaggttgtcagatctggtttggtcgatgcttccggtgtcgcttctttgctagctactactgaagttgctattgtcgacgctccagaaccacctgctgccgcaggtgctggtggcatgccaggtggtatgccaggtatgccaggtatgatgtga

SEQ ID NO: 4484 - DNA, 204 bp, Artificial Sequence
  Optimized genes for Saccharomyces cerevisiae
atggactccaagactccagtcactttggctaaggttatcaaggtcttgggtagaactggttctagaggtggtgttactcaagttagagttgaattcttggaagacacttccagaaccattgtcagaaacgtcaagggtccagttcgtgaaaacgatattttggttttgatggaatctgaaagagaagctagaagattgagataa

SEQ ID NO: 4485 - DNA, 1689 bp, Artificial Sequence
  Optimized genes for Saccharomyces cerevisiae
atgtctttgttgtacattattttactattcactcaatttttgttgttgccaactgatgcctttgacagatctgccaacaccaacattgctgtctactggggtcaaaactctgccggtacccaagaatctttggccacttactgtgaatcctctgatgctgatattttcttattatccttcttgaaccaattcccaacattgggtttgaactttgctaacgcttgttccgacactttttctgatggtttattgcattgtactcaaatcgctgaagatatcgaaacctgtcaatcccttggtaagaaggttttgttatctttaggtggtgcttccggttcctacttgttcagtgatgactcccaagccgaaactttcgcccaaaccttatgggatacctttggtgaaggtactggtgcctctgaaagaccattcgactctgccgtcgttgacggtttcgatttcgacattgaaaacaataacgaagttggttactctgctttagccaccaagttgagaaccttgtttgctgaaggtacaaagcaatactacttgtccgctgctcctcaatgtccatacccagacgcttctgtcggtgatttgttggaaaatgccgacatcgattttgccttcattcaattctacaacaactattgttctgtttctggccaattcaactgggacacctggttgacctacgctcaaaccgtctccccaaacaagaacatcaagttattcttgggtctaccaggtagtgcctcagctgccggctccggttatatttctgacacatcacttttggaaagtaccattgctgacattgcctcctctagctctttcggtggtattgctctatgggatgcttcgcaagctttctccaatgaattaaatggtgaaccatacgttgaaattttgaagaacttgctaacttctgcatctcaaacagctaccaccactgttgctacttctaagacttctgctgcttccacctcgagcgccagcacctcatctgctagcacttcacaaaagaagaccacacaaagtactacttccactcaatctaaatccaaggtcactctatctcctaccgcttcttccgctattaagacctccatcacccaaaccaccaagactttgacttcttctactaaaaccaaatcttccctaggtactaccaccactgaatcaacattaaactccgttgccattacctccatgaagacaactttatcttctcaaattactagtgctgctttggttactccacaaactactaccacttctattgtctcttctgctccaatccaaactgctatcacttccactttgtctccagctactaagtcttcaagtgttgtttccttgcaaactgccactacctctactttgtctccaaccactacatctacctcttctggttctaccagcagtggttctacttcctccgattcaactgctagaactttggctaaggaattgaatgctcaatatgccgctggtaaattgaacggtaagtccacatgtaccgaaggtgagattgcctgttcagccgatggtaagttcgctgtttgtgaccactctgcttgggtttacatggaatgtgcttctggtaccacttgttatgcttacgattctggtgactctgtgtacactcaatgtaacttctcttacttagaatctaactacttctaa

SEQ ID NO: 4486 - DNA, 192 bp, Artificial Sequence
  Optimized genes for Saccharomyces cerevisiae
atggctaaggttcacggttctttggctagagctggtaaggtcaagtctcaaactccaaaagttgaaaagactgaaaaaccaaagaagccaaagggtagagcttacaagagattgttgtacactagaagattcgtcaacgttactttggttaacggtaaaagaagaatgaacccaggtccatctgttcaataa

SEQ ID NO: 4487 - DNA, 1335 bp, Artificial Sequence
  Optimized genes for Saccharomyces cerevisiae
atgccatctcatttcgacactgttcaattgcacgctggtcaagaaaaccctggtgacaacgctcacagatctagagccgtcccaatttacgctaccacttcctacgttttcgaaaactccaagcatggttcccaattatttggtctagaagttccaggttacgtctactccagattccaaaacccaactagtaacgtcttggaagaaagaattgccgctttggaaggtggcgctgctgccctagctgtctcctctggtcaagctgctcaaactttggctattcaaggtttggctcacactggtgacaacattgtttctacttcttacttgtatggtggtacttacaaccaattcaaaatttctttcaagagattcggtatcgaagccagatttgtcgaaggtgataatccagaagaatttgaaaaggtcttcgatgaaagaaccaaggctgtttacttagaaactatcggtaacccaaagtacaatgttccagatttcgaaaagatcgttgctatcgcccacaagcacggtattccagttgtcgtcgacaacactttcggtgctggtggttatttctgtcaaccaatcaagtacggtgctgatattgtcactcactctgctactaaatggattggtggtcacggtactaccattggtggtatcattgttgactctggtaagttcccatggaaggactacccagagaaattcccacaattttctcaaccagctgaaggttaccacggtaccatctacaacgaagcttacggtaacttagcctacattgtccacgttagaactgaattgttgagagacttgggtccattgatgaacccatttgcctctttcttgttattgcaaggtgttgaaacattatctttgagagctgagagacacggtgaaaatgccttgaaattagccaagtggttggaacaatctccatatgtctcttgggtttcttatccaggtttagcttctcattctcaccacgaaaatgctaagaagtatttgtctaacggtttcggcggtgttttgtccttcggtgtcaaggacttgccaaacgccgacaaagaaactgacccattcaagttgagtggtgcccaagttgttgataacttgaagttggcctccaacttggctaacgttggtgatgctaagaccttggttattgctccatacttcactactcataagcaattgaacgacaaggaaaaattggcttccggtgttactaaggatttgatcagagtttccgtcggtattgaattcatcgatgatatcatcgctgacttccaacaatcctttgaaaccgtctttgctggccaaaagccttag

SEQ ID NO: 4488 - DNA, 2337 bp, Artificial Sequence
  Optimized genes for Saccharomyces cerevisiae
atgttatctgccagatctgctatcaagcgtccaatcgttagaggcttggctaccgtttccaacttaaccagagattccaaggttaaccaaaatttgttggaagaccattctttcatcaactataaacaaaacgtcgaaaccttggatattgtcagaaagagattaaatagaccatttacttatgctgaaaaaatcttatatggtcatttggacgacccacatggtcaagatattcaaagaggtgtctcttatttgaaattgagacctgacagagtcgcctgtcaagacgctactgctcaaatggctattttacaatttatgtccgctggtttgccacaggttgccaaacctgtcactgttcattgtgaccacttgatccaagcccaagttggtggtgaaaaggatttgaagagagctattgacttgaacaaagaagtctacgatttcttggcatctgctaccgctaagtacaatatgggtttctggaagccaggctctggtattatccaccaaatcgttttagagaactacgctttcccaggtgctttgattattggtactgactctcacactccaaacgccggtggcttaggtcaattggctatcggtgtcggtggtgctgatgctgttgatgtcatggctggtagaccatgggaattgaaggccccaaagattttgggcgtcaagttgactggtaaaatgaacggttggacttccccaaaagatatcatcttgaagttagctggtatcaccaccgtcaaaggtggtaccggtaaaattgttgagtacttcggtgatggtgttgacactttctctgccaccggtatgggtactatctgtaacatgggtgctgagattggtgccactacttctgttttccctttcaacaagtccatgatcgaatacttggaagctactggtcgtggtaagattgctgattttgccaagttgtaccacaaggatttattgtctgcagataaggacgctgaatatgacgaagttgttgaaattgatttgaacactttggaaccatacatcaacggtccattcaccccagacttggccactccagtttctaagatgaaggaagttgctgtcgctaataactggccattagatgttcgtgtcggtttaattggttcctgtaccaactcctcctacgaagatatgtctcgttctgcttccattgttaaggacgccgctgctcacggtttgaagtctaaaaccattttcactgtcacaccaggttctgaacaaatcagagccactattgaaagagacggccaattagaaacattcaaggaatttggtggtatcgttttggccaatgcttgtggtccatgtatcggtcaatgggacagaagagacattaagaagggtgataaaaacaccatcgtctcttcttacaacagaaatttcacatctagaaacgacggtaacccacaaactcatgcttttgttgcttctccagaattagttactgccttcgccatcgctggtgacttaagattcaatcctttgaccgacaaattaaaggacaaggatggtaacgaattcatgttgaagcctccacacggtgacggtctacctcaaagaggttacgatgcaggtgaaaatacttaccaagctccaccagctgaccgttccactgttgaagtcaaggtctccccaacctctgatagattgcaattgctaaaaccattcaagccatgggatggtaaggatgctaaagacatgccaattttgatcaaagccgttggtaagaccactaccgatcacatttctatggccggtccttggttgaaatacagaggtcacctagaaaacatctctaacaactacatgattggcgccattaacgctgaaaacaagaaggctaactgtgttaagaacgtttacactggcgaatacaagggtgttccagatactgcaagagattaccgtgaccaaggtattaaatgggttgtcatcggcgatgaaaacttcggtgaaggttcttccagagaacacgctgccttggagccaagatttttgggtggttttgctatcattaccaagtcattcgctagaattcacgaaactaacttgaagaagcaaggtttgttaccattgaactttaagaacccagccgactacgacaagatcaatccagatgatagaatcgacatcttgggtttagccgaattggctcctggtaagccagtcaccatgagagttcacccaaagaatggtaagccatgggatgccgtcttgactcacaccttcaacgatgaacaaattgaatggttcaagtacggtagtgctttaaacaagatcaaggctgacgaaaagaaataa

SEQ ID NO: 4489 - DNA, 237 bp, Artificial Sequence
  Optimized genes for Saccharomyces cerevisiae
atggctagagaaattactgatatcaagcaattcttggaattgaccagaagagctgatgttaagactgctactgtcaagatcaacaagaaattgaacaaggccggtaagccattcagacaaaccaagttcaaggtcagaggttcttcttccttgtacactttggttattaacgatgctggtaaggctaagaagttgattcaatctttgccaccaaccttgaaggttaacagattgtaa

SEQ ID NO: 4490 - DNA, 939 bp, Artificial Sequence
  Optimized genes for Saccharomyces cerevisiae
atgggtggtattagagaaaagaaggctgaatactttgctaagttgagagaatatttggaagaatacaaatctttattcgtcgttggtgttgacaacgtttcttctcaacaaatgcacgaagtcagaaaggaattacgtggtagagctgttgtcttgatgggtaaaaacaccatggttagaagagctatcagaggtttcttgtccgatttgccagatttcgaaaaattgctaccatttgttaagggtaatgtcggttttgtcttcactaacgaaccattgactgaaatcaagaacgtcattgtttccaacagagttgccgctccagccagagccggtgctgtcgctcctgaagatatctgggttcgtgccgttaacactggtatggaaccaggtaagacttctttcttccaagctttgggtgtcccaaccaagatcgctagaggtactattgaaattgtctctgacgtcaaggttgttgatgctggtaacaaggtcggccaatctgaagcttccttgttaaacttgttgaacatttctccattcacctttggtttaactgttgttcaagtctacgataacggtcaagttttcccatcctctattttggacattactgatgaagaattggtttcccacttcgtttctgctgtctccaccattgcctccatctctttggccattggttacccaactttaccatctgttggtcacactttgatcaacaactacaaggacttattggctgttgctattgctgcctcttaccactatccagaaattgaagacttggtcgacagaatcgaaaacccagaaaagtacgctgctgctgctccagctgctacttccgctgcttctggtgacgctgccccagctgaagaagccgccgccgaagaagaggaagaatctgatgatgacatgggtttcggtttgttcgattaa

SEQ ID NO: 4491 - DNA, 5631 bp, Artificial Sequence
  Optimized genes for Saccharomyces cerevisiae
atgaacaccgaccaacaaccataccaaggtcaaactgactatacccaaggtccaggtaacggtcaaagtcaggaacaagattacgaccaatacggccagccactttacccatcccaagctgatggctactacgatccaaacgttgctgccggtactgaagcagacatgtacggtcaacaaccacctaatgagtcgtatgatcaagactacaccaacggtgagtattacggtcaaccaccaaacatggccgctcaagatggtgaaaatttctccgatttttcatcctacggtccaccaggtactccaggttatgactcttatggtggtcaatacaccgcatctcaaatgtcttacggtgaaccaaattcttctggcacttccacaccaatctatggtaattatgacccaaatgctattgccatggctttgcctaacgaaccttacccagcttggactgctgactctcaatccccagtctccattgaacagatcgaagacattttcattgacttgaccaatagattaggtttccagagagattccatgagaaatatgttcgaccacttcatggtcttactagactccagatcttccagaatgtctccagatcaagctttattgtctttgcacgctgattatatcggcggtgacactgccaactataagaaatggtattttgctgctcaattggacatggacgatgaaatcggtttccgtaacatgtcattgggtaagttaagcagaaaggctagaaaggctaagaagaagaataagaaggctatggaagaagccaatccagaagacactgaggaaaccttaaacaagattgaaggtgacaactctctagaagctgctgacttcagatggaaagccaagatgaaccaattatctccattggaacgtgttagacacattgctttgtacttgttatgttggggtgaagctaaccaagttagattcacagctgaatgtctatgttttatatacaagtgtgcattggactacttagattctccattgtgtcaacaacgtcaagaaccaatgccagagggtgatttcctaaacagagttatcacccctatctaccatttcatcagaaaccaagtctacgaaattgtcgacggtagatttgtcaaaagagaaagagaccacaacaagattgttggttacgatgatttgaaccaacttttctggtaccctgaaggtatcgctaaaattgtattagaggatggtactaagttgattgaattaccattggaagagagatatttgagattgggtgacgttgtttgggatgatgttttcttcaagacttacaaggaaaccagaacttggttacatttagttactaattttaacagaatttgggttatgcacattagcatcttctggatgtacttcgcttacaatagtccaaccttctatacccacaattaccaacagttggttgacaaccaacctttggcagcttacaaatgggcttcttgtgccttgggtggtactgttgcctctttgattcaaatcgtcgctaccttgtgtgaatggtccttcgtcccacgtaagtgggccggtgctcaacatttgtcaagaagattttggttcttgtgcattatctttggtattaatctaggtcctattatcttcgtcttcgcttacgataaggacacagtttacagtactgctgctcacgttgttgctgctgtcatgttcttcgtggccgttgccaccattatattcttttccatcatgcctttgggtggtttgttcacttcttacatgaagaagtctaccagaagatacgttgcttcgcaaactttcaccgctgctttcgctccattgcatggtttggaccgttggatgtcgtacttggtatgggttaccgtttttgcagcaaaatactccgaatcttactacttcttggttctctctttgcgtgatcctataagaattttgtccaccactgctatgcgttgtaccggtgaatactggtggggtgccgtgttgtgcaaggtccaaccaaagatcgttttgggcttggtcatcgccactgactttattttattctttttagacacctacctatggtacatcattgtcaacactattttctctgtcggtaagtctttctacttaggaatttcaattttgaccccatggagaaacatcttcactagattgccaaagagaatttattccaagatcttggctactaccgatatggaaatcaagtacaagccaaaggttttgatttctcaggtctggaacgctatcatcatctccatgtatcgtgaacaccttttggctattgatcatgttcaaaaattgctatatcatcaagttccatctgagattgaaggtaagagaactttgagagctccaacattttttgtttcacaagatgataacaacttcgaaactgaattcttcccaagagattccgaggctgaaagacgtatctcttttttcgcacaatctctttccactccaattccagaacctctaccagtcgataacatgccaacttttactgttttgactcctcattacgctgaaagaatcttgttgagtttaagagaaattattagagaagatgaccaattttctcgtgtcaccctattagaatacttgaagcaattgcacccagttgaatgggagtgtttcgttaaggataccaaaatcttagctgaagaaactgccgcatatgaaggtaacgaaaacgaagctgaaaaggaagatgctttgaagtcccaaattgatgacttgccattctactgtattggtttcaaatccgctgcaccagaatacactttgaggactagaatctgggcttccttgcgttctcaaactttgtacagaaccatttccggtttcatgaactactcacgtgccatcaagttgttatacagagtcgaaaacccagaaattgttcaaatgttcggtggtaacgcagaaggtttggaaagagaattggaaaagatggctcgtagaaagtttaagttcttagtttctatgcaaagattggccaaattcaagccacatgaactagagaatgctgagtttttgttgagagcctaccctgatttacaaattgcttatctagatgaagaacccccattaaccgaaggcgaagaaccaagaatttactctgctctaattgacggtcactgtgaaattcttgacaatggtagaagaagaccaaaattcagagtgcaattatcaggtaacccaatcttaggcgatggtaaatctgataatcaaaaccacgccttgatcttttacagaggtgaatatattcaattgatcgatgccaaccaagacaactacttggaagaatgtttgaaaattagatctgttctagctgaatttgaagaattgaacgtcgagcaagtcaacccatatgctcctggtctaagatacgaagaacaaaccaccaaccatccagttgcaattgttggtgctagagaatacattttctctgaaaactctggtgtattgggtgatgttgctgctggcaaagaacaaaccttcggtaccctttttgccagaacattatcccagattggtggtaagctacactatggtcatccagactttattaacgctactttcatgactacaagaggtggtgtttccaaagctcaaaagggtttacatttgaatgaagatatctacgccggtatgaatgccatgttgagaggtggtaggattaagcattgcgaatattatcaatgtggtaaaggtagagacttagggtttggtaccatcttgaactttaccaccaagatcggtgcaggtatgggtgaacaaatgctttctcgtgagtactactatttaggaactcagttacctgttgatagattcttgactttctactacgctcatcctgggttccacttgaacaacttatttatccaattgtctttgcaaatgtttatgttaactttggttaacttgtcctccttagcccacgaatccatcatgtgtatctacgacagaaacaaaccaaaaactgatgtcttggtgccaattggctgttacaacttccaacctgctgttgactgggttcgtcgttacactttatctattttcatcgtcttttggatcgcttttgttccaatcgttgtccaagaattaatcgaaagaggcttatggaaggccactcaaagattcttctgtcacttgttgtcgttgtcaccaatgtttgaagtttttgccggccaaatctactcttctgctttgttgtctgacctggccattggtggcgccagatacatttctacaggtcgtggttttgctacctccagaattcctttctccattttgtattctaggtttgctggttctgccatttacatgggtgctaggtcgatgttgatgctgttgtttggcactgtcgctcactggcaagccccactattgtggttctgggcttccttgtcctctttaatttttgccccatttgttttcaaccctcaccaattcgcctgggaagacttcttcttggattaccgtgactacatcagatggctatctagaggtaacaatcaatatcacagaaactcctggattggttacgtcagaatgtcccgtgctagaatcactggtttcaagagaaaattagtcggtgacgaatctgaaaaagctgctggtgacgcttctagagctcacagaaccaacttgattatggccgaaatcattccatgtgctatctatgccgctggttgtttcattgcctttacattcatcaacgcccaaacaggtgtcaagaccactgatgacgacagagttaactccgtcctacgtattattatttgtactttggctccaattgctgttaatttgggtgttttgtttttctgcatgggtatgtcctgctgctctggtccattattcggtatgtgttgtaagaagactggttccgttatggctggtattgcacacggtgttgctgtcattgtccacattgctttctttatcgtcatgtgggtcttggagtctttcaactttgtcagaatgttgattggtgtggtcacttgtatccaatgccaaagactaatctttcattgtatgaccgccttaatgttgaccagagagttcaagaacgaccatgctaacacagccttctggaccggtaagtggtacggtaagggtatgggttacatggcttggactcaaccaagtcgtgaattgactgctaaggttattgagttgtctgaattcgccgccgatttcgttttaggtcacgtcattctaatctgtcaattgccattgatcatcatcccaaagatcgacaagttccattctatcatgctattctggttgaagccttccagacaaatcagacctccaatttactccttgaaacaaacccgtttgagaaagcgtatggttaaaaagtattgttctttgtactttttggtcttggctatttttgctggttgtattattggcccagccgtcgcctccgccaagattcacaagcacatcggtgattctttggatggtgtcgttcacaacttgttccaacccatcaacactactaacaacgatactggttctcaaatgtctacttaccaatctcactactatactcacactccatctttaaagacctggtctactatcaaataa

SEQ ID NO: 4492 - DNA, 384 bp, Artificial Sequence
  Optimized genes for Saccharomyces cerevisiae
atggctaagcaatctttggatgtttcttccgaccgtcgtaaagctagaaaggcttacttcactgctccatcttctcaaagaagagtcttgttgtctgccccattgtccaaagaattgagagctcaatacggtatcaaggccttgccaattagaagagatgatgaagttttggttgttagaggttctaagaagggtcaagaaggtaagatctcctctgtctacagattgaagttcgctgttcaagttgataaggtcactaaggaaaaggttaacggtgcttctgttccaatcaacttgcatccatccaagttagttattaccaagttgcacttggacaaggacagaaaggctttgattcaaagaaaaggtggtaaattggaataa

SEQ ID NO: 4493 - DNA, 1188 bp, Artificial Sequence
  Optimized genes for Saccharomyces cerevisiae
atgttgagaactcaagctgctagattgatctgtaactccagagttatcaccgctaagagaacctttgctttagctaccagagccgctgcttactctagacctgctgccagattcgtcaagccaatgattactacccgtggtttgaagcaaattaacttcggtggtaccgttgaaactgtctacgaaagagctgattggccaagagaaaagttgttggattatttcaaaaatgatactttcgctttgattggttatggctcccaaggttacggtcaaggtttaaacttgagagacaacggtttgaacgttattattggtgttagaaaagatggtgcctcttggaaagctgccattgaagacggttgggttccaggtaaaaacttgttcactgttgaagatgctatcaagagaggttcatacgtcatgaacttattgtctgatgccgcccaatccgaaacttggccagctattaagccattattgaccaagggtaagactttgtacttctcccatggtttctctccagttttcaaggacttgactcacgttgaaccaccaaaggatttggacgtcattttggttgctccaaaaggttccggtcgtactgtcagatctttgtttaaggaaggtagaggtatcaactcttcttacgctgtctggaacgatgtcactggtaaggctcacgaaaaggctcaagccttggctgttgccatcggttctggttacgtttaccaaactacttttgaaagagaagtcaacagtgatttgtatggtgaacgtggttgtttgatgggtggtattcacggtatgttcttggctcaatacgatgttttgcgtgaaaacggtcactctccatctgaagctttcaacgaaaccgtcgaagaagccacccaatctctatatccattgattggcaagtacggtatggactacatgtacgacgcttgttctaccactgctagaagaggtgctctagactggtacccaattttcaagaacgctttgaaaccagtcttccaagatttatatgaatctactaagaatggtactgaaacaaagcgttctttagaattcaattctcaaccagattacagagagaaattggaaaaagaattggacactatcagaaacatggaaatctggaaggttggtaaggaagttagaaagttaagaccagaaaaccaataa

SEQ ID NO: 4494 - DNA, 171 bp, Artificial Sequence
  Optimized genes for Saccharomyces cerevisiae
atggctcacgaaaacgtctggttctctcatccaagaagatatggtaagggttctagacaatgtagagtttgttcttctcacactggtttgatcagaaagtacggtttgaacatctgtcgtcaatgtttcagagaaaaggctaacgatattggtttcaacaagttccgttaa

SEQ ID NO: 4495 - DNA, 237 bp, Artificial Sequence
  Optimized genes for Saccharomyces cerevisiae
atgttgtgtcaacaaatgatcagaaccactgctaagagatcttctaacattatgactagaccaattatcatgaagagatccgttcacttcaaggatggtgtttacgaaaacatcccattcaaggttaagggtagaaagactccatacgctttgtctcatttcggtttcttcgctattggttttgctgttccatttgttgcttgttacgttcaattgaagaagtctggtgctttctaa

SEQ ID NO: 4496 - DNA, 342 bp, Artificial Sequence
  Optimized genes for Saccharomyces cerevisiae
atggctggtttgaaggacgttgttaccagagaatacactatcaacttgcacaagagactacacggtgtttctttcaagaaaagagccccaagagctgtcaaggaaatcaagaagttcgctaaattgcacatgggtactgaagatgttagattggctccagaattgaaccaagctatctggaagagaggtgttaagggtgtcgaatacagattgagattaagaatttccagaaagagaaacgaagaagaagacgctaagaacccattgttctcttacgttgaaccagttttggttgcttctgccaagggcttgcaaactgttgtcgttgaagaggatgcttaa

SEQ ID NO: 4497 - DNA, 768 bp, Artificial Sequence
  Optimized genes for Saccharomyces cerevisiae
atggctgttggtaaaaacaaaagattgtctaagggcaagaagggtcaaaagaagagagttgttgacccattcaccagaaaggaatggttcgacattaaggctccatctactttcgaaaacagaaacgtcggtaagactttggttaacaagtccaccggtttgaagtctgcttctgacgctttgaaaggtagagtcgttgaagtttgtttggctgatttgcaaggctccgaagatcattctttcagaaagatcaagttgcgtgttgatgaagttcaaggtaagaacttgttgaccaacttccacggtatggactttaccactgacaagttgagatccatggttagaaaatggcaaactttgattgaagccaacgttactgtcaagacctctgatgactacgttttgagaatttttgctattgctttcactagaaagcaagctaaccaagttaagagacactcttacgctcaatcttctcacattagagctatcagaaaggttatttctgaaattttgaccaaagaagtccaaggttccaccttggcccaattgacttccaagttaattccagaagttatcaacaaggaaatcgaaaatgctaccaaggatattttcccattgcaaaacattcacgtcagaaaggtcaaattgttaaaacaaccaaagttcgatgttggtgctttgatggccttgcatggtgaaggttctggtgaagaaaagggtaagaaagtcactggtttcaaggacgaagtcttggaaactgtttaa

SEQ ID NO: 4498 - DNA, 531 bp, Artificial Sequence
  Optimized genes for Saccharomyces cerevisiae
atgactgctcaacaagctccaaaatggtacccatctgaagatgttgctgctccaaagaagaccagaaaggctgttagaccacaaaagttgagagcttccttggttccaggtactgttttgattttgttagctggtagattcagaggtaagagagttgtttacttgaagcacttggaagacaacactttgttggtcactggtccattcaaggttaatggtgtcccattgagaagagtcaacgctagatacgttattgctacttctaccaaggtctctgttgaaggtgttaacgttgaaaagttcaacgtcgaatactttgctaaggaaaaattgaccaagaaggaaaagaaagaagctaacttgttcccagaacaacaaactaaggaaatcaagactgaaagagtggaagaccaaaaagttgtcgacaaagctttgttggctgaaattaagaagactccattattaaagcaatacttatctgcttctttctctttgaagaacggtgacaagccacatttgttgaaattctaa

SEQ ID NO: 4499 - DNA, 1152 bp, Artificial Sequence
  Optimized genes for Saccharomyces cerevisiae
atgtccgaaactgaattgagaaagagacaagctcaatttaccagagaattgcacggtgatgatattggtaagaagaccggtttgtctgctttgatgtctaagaataactctgcccaaaaagaagctgtccaaaagtacttaagaaactgggatggtagaaccgataaggatgctgaagaaagaagattggaagactataacgaagcaactcactcttactacaacgttgtcactgatttttacgaatacggttggggttcttctttccatttctccagattctacaaaggtgaatcttttgctgcttctattgctagacacgaacattacttggcttacaaggctggtattcaaagaggtgatttagttttggatgttggttgcggtgtcggtggtccagctcgtgaaatcgccagatttactggttgtaacgtcatcggtttgaacaacaatgactaccaaatcgctaaggccaagtattacgctaagaaatacaatttatctgaccaaatggatttcgtcaagggtgacttcatgaagatggactttgaagaaaacactttcgacaaggtctacgccattgaagctacttgtcacgctccaaaattggaaggtgtttactctgaaatttacaaggttttaaagccaggtggtacttttgccgtttatgaatgggttatgactgacaaatacgatgaaaacaacccagaacacagaaagattgcctacgaaatcgaattaggtgacggtatcccaaagatgttccacgttgacgttgctagaaaagctttgaagaactgtggtttcgaagtcttggtctctgaagatttggctgacaacgatgacgaaattccatggtactacccattgactggtgaatggaagtacgttcaaaacttggccaacttagctaccttcttcagaacttcttatttgggtcgtcaattcaccactgctatggttaccgtcatggaaaagttgggtttagccccagaaggttccaaggaagttactgccgctttagaaaatgctgctgttggtttggttgccggtggtaaatctaaattattcactccaatgatgttgttcgttgcaagaaagcctgaaaacgctgaaaccccatctcaaacttcccaagaagccactcaataa

SEQ ID NO: 4500 - DNA, 636 bp, Artificial Sequence
  Optimized genes for Saccharomyces cerevisiae
atgcaagtcttgcaattatggttgaccactttgatttccttagttgttgctgttcaaggtttgcacttcgacattgctgcttctactgacccagaacaagtttgtatcagagatttcgttactgaaggtcaattggtcgtcgctgatattcactctgacggttctgtcggtgatggtcaaaagttgaacttgtttgttcgtgactctgttggtaacgaatacagaagaaagagagattttgctggtgacgttagagttgctttcactgctccatcttccactgccttcgatgtctgtttcgaaaaccaagctcaatacagaggtagatctttgtccagagctatcgaattggacattgaatccggtgctgaagctagagactggaacaagatctctgctaacgaaaagttgaagccaattgaagttgaattaagacgtgtcgaagaaatcactgatgaaattgtcgacgaattgacttacttgaagaacagagaagaaagattgagagacactaatgaatctaccaacagaagagtcagaaacttctctattttggttattattgttttgtcttctttgggtgtctggcaagttaactatttgaaaaactacttcaagaccaagcacatcatttaa

SEQ ID NO: 4501 - DNA, 411 bp, Artificial Sequence
  Optimized genes for Saccharomyces cerevisiae
atgggtagagttagaaccaagactgttaagagagcttccaaggctttgattgaacgttactacccaaagttgactttggatttccaaaccaacaaaagattgtgtgatgaaattgctactatccaatctaagcgtttgagaaacaagatcgctggttacactactcacttgatgaagagaattcaaaagggtccagtcagaggtatttctttcaagttgcaagaagaagaaagagaaagaaaggaccaatacgttccagaagtttctgccttggacttgtccagatctaacggtgttttgaacgttgacaaccaaacttctgatttggtcaagtctttgggtttgaagttgccattgtctgttatcaacgtctctgctcaaagagacagaagatacagaaagagagtgtaa

SEQ ID NO: 4502 - DNA, 441 bp, Artificial Sequence
  Optimized genes for Saccharomyces cerevisiae
atgtctttggtcgttcaagaacaaggttctttccaacacattttgagattattaaacaccaacgtcgatggtaacattaagattgtttacgctttgaccactatcaagggtgttggtcgtagatactctaacttggtttgtaagaaggctgatgttgacttgcacaagagagctggtgaattgactcaagaagaattagaaagaattgtccaaatcatgcaaaacccaactcactacaagatcccagcttggttcttgaacagacaaaacgatatcactgacggtaaggactaccacactttggctaacaacgttgaatccaagttgagagatgatttggaaagattgaagaaaattagagctcacagaggtatcagacacttctggggtttgagagttagaggtcaacataccaagactactggtagaagaagagcttaa

SEQ ID NO: 4503 - DNA, 591 bp, Artificial Sequence
  Optimized genes for Saccharomyces cerevisiae
atggttgcccaagtccaaaagcaagctccaactttcaagaagactgctgttgttgatggtgtcttcgatgaagtttccttggacaaatacaagggtaagtacgttgtcttggccttcatcccattagctttcacttttgtttgtccaactgaaatcattgctttctccgaagccgctaagaagttcgaagaacaaggtgctcaagttttgtttgcttctactgactctgaatactctttattggcttggactaacatcccaagaaaggaaggtggtttgggtccaatcaacattccattgttggctgacaccaaccactctttgtccagagactacggtgttttgattgaagaagaaggtgttgctttgagaggtttattcattattgacccaaagggcgttatcagacacattaccattaacgatttgccagttggtagaaacgttgacgaagctttaagattggtcgaagcattccaatggaccgacaagaacggtactgttttaccatgtaactggactccaggtgctgctactatcaagccaaccgttgaagactccaaggagtactttgaagctgccaacaaataa

SEQ ID NO: 4504 - DNA, 768 bp, Artificial Sequence
  Optimized genes for Saccharomyces cerevisiae
atggctgttggtaaaaacaaaagattgtccagaggtaagaagggtttgaaaaagaaagtcgttgacccattcacaagaaaggaatggttcgacatcaaggctccatctactttcgaaaacagaaacgtcggtaagactttggttaacaagtctaccggtttgaagaatgcttctgatgctttaaaaggtagagttgttgaagtttgtttggctgatttgcaaggttctgaagatcattctttcagaaaggtcaagttaagagtcgatgaagtccaaggtaagaacttgttaaccaacttccacggtatggacttcaccactgacaagttgagatccatggttagaaaatggcaaaccttgatcgaagccaacgttactgtcaagacctccgatgactacgttttgagaatttttgccattgctttcactagaaaacaagctaaccaagttaagagacactcttacgctcaatcttctcacatcagagctattagaaaggttatttccgaaatcttgaccagagaagttcaaaactccactttggcccaattgacttccaagttgattccagaagttatcaacaaggaaattgaaaacgctaccaaggatattttcccattgcaaaacattcacgtcagaaaggtcaaattgttgaagcaaccaaagttcgatgttggtgctttgatggccttgcatggtgaaggttctggtgaagaaaagggtaagaaggtttccggtttcaaggacgaagtcttggaaactgtttaa

SEQ ID NO: 4505 - DNA, 531 bp, Artificial Sequence
  Optimized genes for Saccharomyces cerevisiae
atgtctgctcaaaaggctccaaagtggtacccatctgaagatgttgctgctttgaagaagaccagaaaggctgccagaccacaaaagttgagagcttctttggttccaggtactgttttgatcttgttggctggtagattcagaggtaagagagtcgtttacttaaagcacttggaagacaacactttgttaatttctggtccattcaaggtcaatggtgtcccattaagaagagttaatgctagatacgttattgccacttctaccaaggtttctgttgaaggtgttaacgtcgaaaagttcaacgttgaatactttgctaaggaaaaattgactaagaaggaaaagaaagaagctaacttgttcccagaacaacaaaacaaggaaatcaaggccgaaagagtggaagaccaaaaagttgttgacaaagccttgattgctgaaattaagaagactccattgttgaagcaatacttgtctgcctctttctccttgaagaacggtgacaagccacacatgttgaaattctaa

SEQ ID NO: 4506 - DNA, 180 bp, Artificial Sequence
  Optimized genes for Saccharomyces cerevisiae
atgttgaagagattcccaactccaattttgaaggtctactggccattctttgttgctggtgctgccgtttactacggtatgtctaaggctgctgatttgtcttctaacaccaaggaattcatcaacgacccaagaaacccaagatttgctaagggtggtaagttcgttgaagttgattaa

SEQ ID NO: 4507 - DNA, 960 bp, Artificial Sequence
  Optimized genes for Saccharomyces cerevisiae
atggcttccaacgaagttttggttttaagaggtactttggaaggtcataacggttgggttacttctttggctactagtgctggccaaccaaacttgttgttatctgcttctagagataagactttgatctcttggaagttgactggtgacgaccaaaagttcggtgtcccagtcagatctttcaagggccactctcacattgttcaagactgtaccttgaccgctgacggtgcttacgctttgtctgcctcctgggacaaaactttgagattgtgggatgtcgctactggtgaaacttaccaaagattcgttggtcacaagtctgatgttatgtctgttgacattgacaagaaagcttccatgattatttctggttccagagacaagaccattaaggtttggactatcaagggtcaatgtttggctaccttattgggtcacaacgattgggtttctcaagttagagttgttccaaatgaaaaggccgatgacgattccgttaccatcatctccgccggtaacgacaagatggttaaggcttggaacttgaaccaattccaaattgaagctgatttcattggtcacaactctaacatcaacactttaactgcatccccagatggtaccttgattgcttctgctggtaaggacggtgaaatcatgttatggaatttggccgctaagaaggctatgtacaccttgtccgctcaagatgaagtcttttctttggctttctctccaaacagatactggttagctgctgccactgccaccggtattaaagttttctccttggacccacaatacttggtcgatgatttgagaccagaattcgctggttactccaaggctgctgaaccacacgctgtctctctagcttggtctgctgatggtcaaactttgtttgctggttacactgacaacgttatcagagtctggcaagtcatgactgctaactaa

SEQ ID NO: 4508 - DNA, 255 bp, Artificial Sequence
  Optimized genes for Saccharomyces cerevisiae
atggcctccagcacttctactagtgcttctgcctcttcttccatcaagaccaactccgctttggtctccaacaacgttgttgccgcttcatctgtttctgctacttccactgcttcctcttctgctgccaagaacactacctcttcctccaagaatgctgctccaggtatggttgctaacccagtttcctctaagtacggtatcatcatggctgctttcgctgctgtctctttcgttttgggtactggtatttaa

SEQ ID NO: 4509 - DNA, 600 bp, Artificial Sequence
  Optimized genes for Saccharomyces cerevisiae
atggctatttctaagaacttgccaatcttgaaaaaccacttcagaaagcactggcaagaaagagttaaagttcatttcgaccaagctggtaagaaggtttccagaagaaatgctcgtgctgccagagctgctaagatcgctccaagaccattggacttgttgagaccagttgttagagccccaactgtcaagtacaacagaaaggtcagagccggtagaggtttcactttagccgaagttaaggctgctggtttgactgctgcttacgctagaaccattggtattgccgttgaccacagaagacaaaacagaaaccaagaaattttcgatgctaacgtccaaagattgaaggaataccaatccaagattattgttttcccaagagatggtaaagctccagaagctgaacaagttttgtctgccgccgctactttcccaattgctcaaccagctaccgatgttgaagccagagctgttcaagacaacggtgaatctgctttcagaactttgcgtttggctagatctgaaaagaagttccgtggtatcagagaaaagagagctcgtgaaaaggctgaagctgaagcagaaaaaaagaaataa

SEQ ID NO: 4510 - DNA, 2118 bp, Artificial Sequence
  Optimized genes for Saccharomyces cerevisiae
atggctggtgaaacatttgaattccaagctgaaatcactcaattgatgtccttaatcatcaacaccgtctactctaacaaggaaatcttcttaagagaattgatctccaatgcttctgatgccttggacaaaattagataccaagccttatccgatccaaagcaactagaaactgaaccagatttattcattcgtatcaccccaaaaccagaagaaaaggtcttggagatcagagattcaggtattggtatgactaaggctgaattgatcaacaacttaggtactattgctaagtctggtacaaaggctttcatggaagcattgtctgctggtgctgatgtttccatgattggtcaattcggtgtcggtttctattctttatttttggttgccgacagagtccaagttatctctaagaacaacgaagatgaacaatacatctgggaaagtaacgccggtggttctttcactgttactttggatgaagtcaatgaaagaatcggtagaggtaccgttttgagattgttcttgaaggatgaccaattggaatacttggaagaaaagagaatcaaggaagttattaagagacactctgagtttgttgcttacccaatccaattattggtcactaaggaggtggaaaaggaagttcctatcccagaggaagagaagaaagacgaagaaaagaaggacgaagatgataagaagccaaagttggaggaagttgacgaagaagaagaagaaaagaagcctaagaccaagaaggttaaagaggaagttcaagagttggaagaattaaacaaaaccaagccattatggactagaaacccatctgacattactcaagaagagtataacgctttttacaaatccatttccaacgactgggaagacccattgtacgtcaagcacttctctgttgaaggccaattagaattcagagctattttgtttattccaaagagagctccatttgacttgttcgaatccaaaaaaaagaagaacaatatcaaattgtatgtcagaagagttttcatcactgacgaagctgaagatttgattcctgaatggttatcattcgttaagggtgttgttgactctgaggatttgccattgaacttgtcccgtgaaatgttgcaacaaaacaagatcatgaaagtcatcagaaagaacattgttaagaagttgattgaagccttcaacgaaattgccgaagattctgaacaattcgacaagttctactccgcctttgctaaaaacatcaagctaggtgttcacgaagacacccaaaatagagccgctttggctaagcttttgcgttacaactctaccaagtctgtcgacgagttaacctccttgaccgactacgttaccagaatgccagaacaccaaaagaatatttactacattaccggtgaatctttgaaggctgttgagaaatctccattcttggacgctctaaaggccaagaacttcgaggtcttattcctaactgatcctattgatgaatacgctttcacccaattgaaggaatttgaaggtaagaccttggtggatattaccaaagatttcgaattggaagaaaccgatgaagaaaaagcagaaagagaaaaagaaattaaagaatatgaacctttgactaaagctttaaaggatatcttgggtgatcaagtcgaaaaagttgtcgtctcctacaagttattagatgctcctgctgctatcagaactggtcaatttggttggtctgccaacatggagagaattatgaaggcccaagctttgagagactcctctatgtcttcttacatgtcttccaagaagactttcgaaatttctccaaagtccccaattatcaaggaattgaaaaagcgtgttgatgaaggtggtgctcaagacaagactgtcaaggacttgaccaacttgctatttgaaaccgctttgttgacttccggtttttctttggaagaaccaacttctttcgcttccagaattaacagattaatttcattgggtttgaacattgacgaagacgaggagaccgaaactgctccagaagcttcaacagaggccccagttgaagaagttccagctgacactgaaatggaagaagtcgattaa

SEQ ID NO: 4511 - DNA, 303 bp, Artificial Sequence
  Optimized genes for Saccharomyces cerevisiae
atgaccgtcaagactggtattgctattggtttgaacaagggtaagaaggtcacttccatgactccagctccaaagatctcttacaagaaaggtgctgcttccaacagaaccaagttcgtcagatctttggttagagaaattgctggtttatctccatacgaaagaagattgattgacttgatcagaaactctggtgaaaagagagctagaaaggttgctaagaagcgtttgggttctttcactagagccaaggctaaagttgaagaaatgaacaacattattgccgcttctagaagacattaa

SEQ ID NO: 4512 - DNA, 669 bp, Artificial Sequence
  Optimized genes for Saccharomyces cerevisiae
atgaagttcttcccattgttgttattgattggtgtcgtcggttacattatgaacgttttgttcactacctggttgccaaccaactacatgttcgacccaaagaccttgaacgaaatctgtaactctgtcatttccaagcacaacgctgctgaaggtttgtccactgaagacttgctacaagatgttagagatgctttggcctcccactacggtgacgaatacatcaacagatacgttaaggaagaatgggttttcaacaacgctggtggtgctatgggtcaaatgattattttacatgcttctgtttctgaatatttgatcttgtttggtactgctgttggtaccgaaggtcacactggtgttcacttcgctgatgactacttcaccattttgcacggtactcaaattgctgccttaccatacgctactgaagctgaagtctacactccaggtatgactcaccacttgaagaagggttatgctaagcaatactccatgccaggtggttctttcgccttggaattggctcaaggttggattccatgtatgttgccattcggtttcttggacactttctcttctactttggatttgtacaccttatacagaactgtttacttgactgccagagacatgggtaagaacttgttgcaaaacaagaaattctaa

SEQ ID NO: 4513 - DNA, 2880 bp, Artificial Sequence
  Optimized genes for Saccharomyces cerevisiae
atgaccgttaccacaccattcgtcaacggtacatcttactgtaccgttactgcatactccgttcaaagttacaaggctgctatcgacttctacaccaagttcttgtctctagaaaatagatcatctccagatgaaaactccactttgttgtccaacgactctatctccttgaagatcttattaagacctgacgaaaagattaacaagaacgtcgaagctcacttgaaagaattgaactccatcactaaaactcaagattggagatcccacgctacccaatctttggttttcaacacttctgatattttagctgttaaagatactttgaacgctatgaatgccccattacaaggttacccaactgagttgttcccaatgcaattgtatactttggacccactaggtaatgttgtcggtgtcacttccaccaagaatgctgtctccaccaaaccaaccccacctccagctccagaagctagtgctgaatctggtctatcctctaaagttcactcctacactgatttggcttacagaatgaaaaccactgacacttatccaagtttgccaaagccattgaacagaccacaaaaagccattgccgtcatgactagtggtggtgacgctccaggtatgaactccaatgtcagagctattgttagatctgccattttcaaaggttgtagagctttcgttgttatggaaggttacgaaggattggtcagaggtggtccagaatacattaaggaattccattgggaagacgtcaggggttggtctgcagaaggcggtaccaacattggtactgccagatgtatggaattcaagaagcgtgaaggtagattgttgggtgctcaacatttgattgaagccggtgttgacgccttgattgtttgtggtggtgatggttcattgactggtgctgatttattcagaagtgaatggccatctttgattgaagaattattgaagaccaataggatttctaatgaacaatacgaaagaatgaagcatttgaacatctgtggtactgttggttccattgacaatgacatgtctaccaccgatgctaccattggtgcttactctgctcttgatagaatttgtaaggctattgattacgttgaagctactgctaactctcattctagagcctttgttgtggaagtcatgggtagaaactgtggctggttggctttgctagctggtattgctacctccgctgactacatcttcattcctgaaaagccagctacctcttccgaatggcaagaccaaatgtgtgacattgtctctaagcacagatctcgtggtaagagaactaccatcgtcgttgttgccgaaggtgccatcgctgcagacttgaccccaatctctccttccgatgtccacaaggttttagttgacagattaggtttggatacaagaattactactttaggccacgttcaaagaggtggtaccgctgttgcttatgaccgtattttggccaccttgcaaggtttggaagccgttaacgctgtcttggaatctactccagacactccatccccattaattgccgttaacgaaaacaaaatcgttagaaagccattgatggagtctgtcaaattgacaaaggccgtcgctgaagcaattcaagctaaggatttcaagagagccatgtccttgagagacaccgaatttatcgaacacctaaacaatttcatggctatcaattctgctgatcacaacgaaccaaaattaccaaaggacaagcgtttgaaaattgctatcgtaaacgttggtgcaccagctggtggtatcaactctgctgtctactctatggctacttactgcatgtctcaaggtcacagaccatacgccatttacaatggttggtccggtttagctagacacgaatctgttcgttctttaaactggaaggatatgttgggttggcaatccagaggtggttctgaaattggcactaacagagtcaccccagaagaagctgatttgggtatgattgcttactacttccaaaagtacgagttcgatggtcttattattgtcggtggttttgaagctttcgagtcgttgcaccaattagaacgtgctagagaatcctatcctgcttttagaattccaatggttttgatcccagccactctttctaacaacgttccaggtactgaatattctttgggctctgacacagctttgaatgctttgatggaatactgtgatgttgttaagcaatcagcttcttctaccagaggtcgtgccttcgttgtcgactgtcaaggcggtaactctggttatttggcaacctacgcttcccttgctgtgggtgcccaagtttcttacgtcccagaggaaggtatttctttggaacaactatctgaagatatcgagtacttggctcaatctttcgaaaaagctgaaggtagaggcagattcggtaaactgatcttgaagtctaccaacgcatccaaggctttatctgccactaagttggctgaagttattaccgctgaggctgacggtagatttgatgccaagcctgcctaccctggtcatgtccaacaaggtggtttgccatctccaattgacagaaccagagctacacgtatggccatcaaggctgttggtttcatcaaggacaaccaagccgctattgcagaggcaagagctgctgaagaaaacttcaacgccgatgataagactatttccgacactgctgccgtggtcggtgtcaagggttctcacgtcgtttacaacagtatcagacaattgtacgattatgaaactgaagtttccatgagaatgccaaaggtcattcactggcaagctactagattgatcgccgaccacttggttggccgtaagagagttgattaa

SEQ ID NO: 4514 - DNA, 804 bp, Artificial Sequence
  Optimized genes for Saccharomyces cerevisiae
atgtctcaaggtcgtaaggctgctgaaagattggctaagaagactgtcttgatcactggtgcctctgctggtattggtaaagctaccgctttggaatacttggaagcttccaacggtgatatgaagttgattttggccgctagaagattagaaaagctagaagaattgaagaagaccattgaccaagaattcccaaatgctaaggttcacgttgctcaattggacatcacccaagccgaaaaaatcaagccattcattgaaaacttaccacaagaattcaaggacattgatatcttggttaacaacgctggtaaggctttaggttctgacagagttggtcaaatcgccaccgaagatattcaagatgtcttcgacaccaacgttactgctttgattaacattactcaagctgttttgccaattttccaagctaaaaactctggtgacattgtcaacttgggttccattgccggtagagatgcttacccaaccggttctatctactgtgcctccaagttcgctgtcggtgctttcactgactctttgagaaaggaattaatcaacaccaagatcagagtcatcttaattgctccaggtttggttgaaactgaattttccttggtcagatacagaggtaacgaagaacaagccaagaacgtctacaaggataccactccattgatggctgatgatgttgccgatttgattgtttacgctacttccagaaagcaaaacactgttattgctgacactttgatcttcccaactaaccaagcttctccacatcacattttcagaggttag

SEQ ID NO: 4515 - DNA, 519 bp, Artificial Sequence
  Optimized genes for Saccharomyces cerevisiae
atggctcacttcaaggaataccaagttatcggtagaagattgccaactgaatctgttccagaaccaaagttgtttagaatgagaattttcgcttctaacgaagttattgctaagtcccgttactggtacttcttgcaaaaattgcacaaggtcaagaaggcttccggtgaaattgtttctatcaaccaaatcaatgaagctcatccaaccaaggttaagaacttcggtgtctgggttagatacgattctagatctggtactcacaacatgtacaaagaaatcagagatgtttccagagttgctgctgttgaaactttgtaccaagatatggccgccagacacagagctagattcagatccattcacattttgaaagtcgctgaaattgaaaagactgctgatgtcaagagacaatacgttaagcaatttttgactaaggacttgaagttcccattgcctcaccgtgttcaaaagtctactaaaactttctcttacaagagaccatctaccttctactaa

SEQ ID NO: 4516 - DNA, 180 bp, Artificial Sequence
  Optimized genes for Saccharomyces cerevisiae
atgaagttgtctcaagttgttgtctctgctgttgccttcactggtttggtttctgccgctaactcctccaactcttcctcttctaagaacgctgctcaaccaattgctggcttgaacaacggtaaggtcgctggtgctgctggtgttgctttggccggtgccttggctttcttgatttaa

SEQ ID NO: 4517 - DNA, 183 bp, Artificial Sequence
  Optimized genes for Saccharomyces cerevisiae
atggctaacaaggttattcaattgcaaaagatcttccaatcttctaccaagccattatggtggagacacccaagatctgctttgtacttgtacccattctacgctattttcgctgttgctgtcgttactccattgttgtacattccaaacgctatcagaggtatcaaggccaagaaggcttaa

SEQ ID NO: 4518 - DNA, 594 bp, Artificial Sequence
  Optimized genes for Saccharomyces cerevisiae
atgatgcacttcagaaagaagtcttctatctctaacacttctgaccacgatggtgccaacagagcctctgatgtcaagatttctgaagatgacaaggctagattgaagatgagaactgcttctgttgctgatccaatcttggatgctgttcaagaagctcaaccatttgaacaagctgctgacactttccacgacaacatgaacagacaatcttacttctctaacgaagaaggtcacgttttgtgtgatgttttcggtcaaccaattactcaagctgacatttccaacccaaccagagctagagatgaaagaccattggacaccatcagatctttcgaatacgctgtctctggtgacccagtctgggctcaacaattggaaactccaacttatggtttcagagttagaccagatttcccagtttttggtgctgccgtcacttacgacgctaacggtatgccacaacaagttggtggtgcttcctctcaaatgtacggtgaacaagccgtttaccaacctcaacaacacgtccaaactgaagaaaagcaaaagaagaagaaaaagggtttgttcggtagaatgaagaagaaataa

SEQ ID NO: 4519 - DNA, 1680 bp, Artificial Sequence
  Optimized genes for Saccharomyces cerevisiae
atgttgttcaaatctttgtccaagttggctactgccgctgcctttttcgccggtgtcgctaccgccgatgatgttccagctattgaagtcgtcggtaacaagttcttttactctaacaacggttctcaattctacattagaggtgttgcttaccaagccgacactgccaatgaaacatctggctccaccgttaacgatccattggccaactatgagtcttgctctcgtgatattccatacttgaagaaattaaacactaacgttattagagtttatgccattaatactactttggaccactctgaatgtatgaaggcattgaacgacgctgatatctacgttatcgctgacttggctgctccagctacttctatcaacagagacgacccaacctggactgtcgacttattcaactcttacaagactgttgtcgatactttcgcaaactacactaatgttttgggtttcttcgctggtaacgaagttaccaacaactacaccaacaccgatgcttctgctttcgtcaaggctgctatcagagatgttagacaatacatctctgacaagaattacagaaagatcccagttggttactccagcaatgatgatgaagacaccagagtcaagatgaccgactactttgcctgtggtgacgatgacgttaaggctgatttctatggtattaacatgtatgaatggtgtggtaaatcagacttcaagacctctggttacgctgacagaactgctgaattcaagaacttgtctattccagtcttcttctccgaatacggttgtaacgaagttactccaagattgtttactgaagttgaagctttgtacggttctaatatgactgatgtctggtccggtggtattgtttacatgtacttcgaagaaactaacaaatacggtttggtctctattgatggtaatgacgtcaaaaccttggatgactttaacaattattcttctgaaatcaacaagatttctccaacttccgctaacaccaagtcctactcagctaccacttctgatgtcgcttgtccagccactggtaagtactggtctgctgctactgaattgccaccaacaccaaacggtggtttatgttcctgtatgaacgctgctaactcatgtgttgtttccgatgatgttgactccgacgattacgaaacccttttcaactggatttgtaatgaggttgactgttctggtatctccgctaatggtactgcaggtaagtatggtgcttactctttctgtaccccaaaggaacaattgtcattcgttatgaatttatactacgaaaagtctggtggttccaagtctgactgttccttctctggtagtgccactttgcaaactgctacaactcaagcttcttgttcttctgccttgaaagaaattggttccatgggtacaaactccgcctccggctctgttgatttgggctcaggtaccgaatcttctaccgcttcctccaatgcttccggttcttcttctaaatccaacagtggttcttccggttcatccagtagctcctcctcttcctctgctagctcttcctcttcatctaagaagaacgccgccaccaacgtcaaggccaacttagctcaagttgttttcactagtattatttccttgtccattgctgctggtgttggttttgctttggtttaa

SEQ ID NO: 4520 - DNA, 411 bp, Artificial Sequence
  Optimized genes for Saccharomyces cerevisiae
atggctagaaccaagcaaactgctagaaagtccaccggtggtaaggctccaagaaaacaattggcctccaaggccgccagaaagtctgctccatctactggtggtgttaagaaaccacacagatacaagccaggtactgttgctttacgtgaaatcagaagatttcaaaaatccactgaattgttgattagaaagttgccattccaaagattggtcagagaaattgctcaagatttcaagactgatttgagattccaatcttctgccattggtgctttgcaagaatctgttgaagcttacttggtttctttgtttgaagacaccaacttggctgctattcacgctaagagagttaccattcaaaagaaggacatcaagttagctcgtcgtttgagaggtgaaagatcttag

SEQ ID NO: 4521 - DNA, 852 bp, Artificial Sequence
  Optimized genes for Saccharomyces cerevisiae
atgtctccaccagtctactctgatatttccagaaacatcaacgacttattaaacaaggatttctaccacgctaccccagctgcttttgatgttcaaactaccactgctaacggtatcaagttctctttgaaggctaagcaacctgtcaaggatggtccattgtccactaatgttgaagctaaattgaacgataaacaaactggtttgggtctaactcaaggttggtccaacactaacaacttgcaaaccaagttggaattcgccaacttaactccaggtttaaagaacgaattgattacttctttgactcctggtgtcgccaagtctgctgttttgaacaccaccttcacccaaccattctttaccgctagaggtgccttcgatttgtgtttgaagtccccaactttcgtcggtgacttgaccatggctcacgaaggtattgttggtggtgctgaattcggttacgatatctccgctggttccatctctcgttacgctatggctttgtcttacttcgctaaggactactccttaggtgctactttgaataatgaacaaatcactactgttgacttcttccaaaacgttaacgctttcttgcaagtcggcgccaaggccactatgaactgtaagttaccaaactctaacgtcaacattgaatttgccaccagatacttgccagatgcttcctctcaagttaaggctaaggtttctgactctggtattgtcaccttggcttacaagcaattgttgagaccaggtgttactttgggtgttggttcttctttcgatgccttgaaattatctgaaccagttcacaagttgggctggtctttatccttcgacgcttaa

SEQ ID NO: 4522 - DNA, 1230 bp, Artificial Sequence
  Optimized genes for Saccharomyces cerevisiae
atggttaaggaaaccaagttctacgatattttgggtgttccagttaccgccactgatgttgaaatcaagaaagcttacagaaagtgtgccttgaagtaccatccagacaagaacccatctgaagaagctgctgaaaaattcaaggaggcctccgctgcctatgaaattttgtctgatcctgaaaagagagacatttacgatcaattcggtgaagatggtttgtccggtgccggcggtgctggtggtttccctggtggtggtttcggttttggtgatgatattttctctcaatttttcggtgccggtggtgctcaaagaccaagaggcccacaaagaggtaaagatatcaagcacgaaatttctgcttctttggaagaattgtacaagggtagaactgccaagttggccttgaacaagcaaatcttgtgtaaggaatgtgaaggtcgtggtggtaagaagggcgctgtcaagaaatgtacctcttgtaacggtcaaggtatcaagtttgttactagacaaatgggtccaatgattcaaagattccaaactgaatgtgatgtttgtcacggtactggtgacatcatcgatccaaaggacagatgtaaatcctgtaatggtaagaaggttgaaaacgaaagaaagatcttagaagtccacgtcgaaccaggtatgaaggatggccaacgtattgttttcaaaggtgaagctgaccaagctccagatgtcatcccaggcgacgttgtcttcatcgtttccgaaagacctcacaagtctttcaagcgtgacggtgatgacttggtttacgaagccgaaattgatttgttgactgctattgctggtggtgaattcgctttggaacacgtttctggtgactggttgaaggtcggtattgttccaggtgaagttatcgccccaggtatgagaaaagttattgaaggtaagggtatgccaattccaaaatacggaggttacggtaacttgattattaagttcactatcaaattcccagaaaaccacttcaccagtgaagaaaatttgaaaaaattggaagaaatcttgccaccaagaattgtcccagccattccaaagaaggctactgttgatgaatgtgttttggctgatttcgacccagctaagtacaacagaaccagagcttccagaggtggtgctaactacgactctgacgaagaggaacaaggtggtgagggtgtccaatgtgcttcccaataa

SEQ ID NO: 4523 - DNA, 597 bp, Artificial Sequence
  Optimized genes for Saccharomyces cerevisiae
atgtctcaaccagttgtcgttattgatgctaaggaccacttgttgggtcgtttagcttccaccattgctaaacaagttttaaacggtcaaaagattgttgtcgtcagagctgaagctttgaacatttctggtgaattcttcagaaacaaattgaagtaccacgatttcttgagaaaggctactgctttcaacaagactagaggtccattccacttccgtgctccatctagaattttgtacaaggctatcagaggtatggtttcccacaagaccgctagaggtaaggccgctttagaaagattgaagatctttgaaggtattccaccaccatacgacaagaagaagagagttgttgttccacaagctttgcgtgttttgagattaaagccaggtagaaaatacactactttgggtaaattgtctacttctgttggttggaagtacgaagacgttgttgctaagttggaagataaaagaaaggttagatctgctgaatactacgctaagaagagagccttcaccaagaaagtttcttctgcctccgctgctgcctctgaatctgatgttgccaagcaattggcttctttcggttactaa

SEQ ID NO: 4524 - DNA, 1449 bp, Artificial Sequence
  Optimized genes for Saccharomyces cerevisiae
atgtctgctttcgttagagttgttccaagaatttctagatcttctgttttgactagatcattaagattacaattgagatgttacgcttcttacccagaacacactatcatcggtatgccagctctatctccaactatgacccaaggtaacttggctgcttggactaagaaagaaggtgaccaattatctccaggtgaagttatcgccgaaattgaaactgacaaagcccaaatggacttcgaattccaagaggatggttacttggccaagatcttggttccagaaggtaccaaggacattccagttaacaagccaattgccgtttacgttgaagataaggccgatgttccagccttcaaggatttcaaactagaagactccggttccgactctaagactagtacaaaggctcaaccagcagaaccacaagctgaaaagaagcaagaagctccagctgaagaaaccaaaacctccgctcctgaagccaagaagtctgatgtcgctgcccctcaaggtagaattttcgcttcccctttggctaagaccattgctttggaaaagggtatttccttgaaggacgttcacggtacaggtccaagaggtcgtatcaccaaggctgatatcgaatcttatttagaaaaatcctctaaacaatcttcccaaacttctggtgctgcagctgctactccagctgccgccacttccagcactaccgctggttctgccccatccccatcttctactgcctcctacgaagatgtccctatttccaccatgagatccatcattggtgaaagattgttgcaatccactcaaggtatcccatcatacattgtttcttccaagatttctatctccaagttgttgaaattgagacaatctttgaacgctactgctaacgacaagtacaagttgtccattaacgatttgttggtcaaagctattactgttgccgctaaaagagtcccagatgctaatgcttactggttgccaaacgaaaacgtcatcagaaagttcaagaacgttgatgtttccgttgctgtcgccacaccaaccggtttattgaccccaatcgttaagaactgtgaagctaagggtttgtctcaaatctctaatgaaatcaaggaattagtcaagagagctagaatcaacaaattagctccagaagaatttcagggtggtactatctgtatctccaatatgggtatgaacaacgccgtcaacatgttcacttctattattaacccaccacagtctaccattttggccattgctaccgtcgaacgtgttgctgttgaagacgctgctgctgaaaacggtttctctttcgacaaccaagttaccatcactggtactttcgatcacagaactattgacggtgccaaaggtgctgaattcatgaaggaattgaagaccgttattgaaaatccattggaaatgttgttataa

SEQ ID NO: 4525 - DNA, 1860 bp, Artificial Sequence
  Optimized genes for Saccharomyces cerevisiae
atggttaaggaatctatcattgctttagctgaacacgctgcatctagagcttccagagtcatcccaccagtcaaattggcttacaagaacatgttgaaagacccatcctctaagtacaagccattcaacgccccaaagctatccaacagaaagtggccagacaacagaatcaccagagccccaagatggttatctaccgatttgagagatggtaaccaatccttgcctgacccaatgtctgtcgaacaaaagaaagaatacttccacaagttggtgaacatcggtttcaaagagattgaagtttctttcccatctgcctcccaaactgattttgatttcactagatacgccgttgaaaatgctccagatgatgtctctattcaatgtttggtccaatcaagagaacatttgattaagagaaccgttgaggctttgaccggtgctaagaaggctaccattcacacttacttggccacttccgacatgttcagagaaattgtcttcaacatgtccagggaagaagccatctccaaggcagttgaagccaccaagttggttcgtaagttaactaaggacgatccttctcaacaagctacaagatggtcttatgaattctctccagaatgtttctcagacactccaggtgaatttgctgtggaaatctgtgaagctgtcaagaaggcttgggaaccaactgaagaaaacccaatcattttcaatttgccagctactgttgaagttgcctccccaaatgtttacgctgaccaaatcgaatattttgccactcacattactgaacgtgaaaaggtctgtatctctactcattgtcacaacgacagaggttgtggtgttgctgctactgagttgggtatgcttgctggtgccgaccgtgttgaaggttgcttgttcggtaacggtgaaagaactggtaacgtcgatttagttactgtcgctatgaacatgtacactcaaggtgtttctccaaacttagacttctctgatttgacttctgttttggacgttgtcgaaagatgtaacaagattccagtttcacaaagagctccatacggtggtgacttggttgtttgtgctttctccggttctcaccaagatgctatcaagaagggttttaacttgcaaaacaaaaagcgtgctcaaggtgaaacccaatggagaattccatatttgccattggatccaaaggatattggtagagactacgaagctgttatcagagttaactctcaatctggtaaaggtggtgctgcttgggttattttgagatctttaggtttggacttaccaagaaatatgcaaattgagttttcctccgctgttcaagaccatgctgactccctaggtagagaattgaagtctgacgaaatttccaaattattcaaggaagcttacaactacaacgatgaacaataccaagccatttcattagtcaactacaatgtcgaaaaatttggtaccgaaagaagagttttcaccggtcaagttaaggttggtgatcaaatcgtcgacattgaaggtactggtaatggtccaatttcttctcttgttgacgctttgtctaacttgttgaacgttagattcgccgtcgccaactatactgaacactctttgggttccggctcttccactcaagctgcttcttacatccacttgtcctacagaagaaacgctgataacgaaaaggcctacaaatggggtgtcggtgtgtctgaagatgttggtgactcttccgtcagagcaatcttcgctaccatcaacaacattattcattctggtgatgtttccattccttctttggctgaagtcgagggtaagaatgccgctgccagtggttctgcttaa

SEQ ID NO: 4526 - DNA, 345 bp, Artificial Sequence
  Optimized genes for Saccharomyces cerevisiae
atgtctgaagttattgaaggtaacgtcaagattgacagaatttccccaggtgacggtgctactttcccaaagaccggtgatttggttaccattcactacactggtactttggaaaacggtcaaaagttcgactcttccgttgaccgtggttctccattccaatgtaacattggtgttggccaagttatcaagggttgggatgtcggtattccaaagttgtctgttggtgaaaaggctagattgactatcccaggcccatacgcttacggtccaagaggtttcccaggtttgattccaccaaactctactttagttttcgatgttgaattgttgaaggttaactaa

SEQ ID NO: 4527 - DNA, 117 bp, Artificial Sequence
  Optimized genes for Saccharomyces cerevisiae
atgcaaccaattaccactgcttctactcaagctacccaaaaggacaagtcttctgaaaagaaggataactacatcatcaagggtttgttctgggatccagcttgtgttattgcttaa

SEQ ID NO: 4528 - DNA, 321 bp, Artificial Sequence
  Optimized genes for Saccharomyces cerevisiae
atggttaacgttccaaagaccagaaagacttactgtaagggtaagacttgtagaaagcacactcaacataaggtcacccaatacaaggctggtaaggcttctttgtttgctcaaggtaaaagaagatacgacagaaaacaatctggtttcggtggtcaaaccaagccagttttccacaagaaagctaagaccactaagaaggttgttttgagattggaatgtgttaagtgtaaaactagagctcaattgactttgaagagatgtaagcatttcgaattgggtggtgaaaagaagcaaaagggccaagctttgcaattctaa

SEQ ID NO: 4529 - DNA, 723 bp, Artificial Sequence
  Optimized genes for Saccharomyces cerevisiae
atggttgctttgatctccaagaagagaaagttggtcgctgatggtgttttctacgctgaattgaacgaattcttcactagagaattagcagaagaaggttactctggtgtcgaagtcagagttactccaaccaagaccgaagttatcatcagagctactagaactcaagatgttttgggtgaaaacggtagaagaatcaacgagttgactttgttggttcaaaagagattcaagtacgccccaggtactattgtcttgtacgctgaaagagtccaagacagaggtttgtctgctgtcgcccaagccgaatccatgaaattcaaattgttgaatggtttagctattagacgtgctgcttacggtgttgttagatacgttatggaatctggtgctaagggttgtgaagttgtcgtttccggtaagttgagagccgctagagctaaggctatgaagttcgctgacggtttcttgattcactctggtcaaccagtcaacgatttcattgacactgctaccagacacgttttgatgagacaaggtgtcttaggtatcaaggttaagatcatgagagacccagccaagtctagaaccggtccaaaggccttgccagatgctgttaccattattgaaccaaaggaagaagagccaattttggctccatctgtcaaggactacagaccagctgaagaaactgaagctcaagctgaaccagttgaagcttaa

SEQ ID NO: 4530 - DNA, 600 bp, Artificial Sequence
  Optimized genes for Saccharomyces cerevisiae
atgtctgccaacgaattctactcttctggccaacaaggtcaatacaaccaacaaaacaaccaagaaagaactggtgccccaaacaatggtcaatatggtgctgacaacggtaaccctaacggtgaaagaggtttgttctctaccattgttggtggttctgctggcgcttacgctggttccaaggtttccaacaaccattctaagttgtctggtgttttgggtgccattggtggtgctttcttggctaacaagatctctgatgaaagaaaggaacacaagcaacaagaacaatacggtaactctaacttcggtggtgctccacaaggtggtcacaacaaccaccacagacaagataacaacaacaataatggtgggttcggtggtccaggtggtccaggtggtcaagggtttggtcgtcaaggccctcaaggtttcggtggtcctggtcctcaagaatttggtggtccaggtggtcaaggtttcggtggtccaaatccacaggaattcggtggcccaggcggtcaaggttttggtggtccaaacccacaagagtttgggggccagggtagacaaggtttcaacggtggttccagatggtga

SEQ ID NO: 4531 - DNA, 1842 bp, Artificial Sequence
  Optimized genes for Saccharomyces cerevisiae
atggctgaaggtgttttccaaggtgctattggtattgacttaggtaccacctactcttgtgttgccacttacgaatcttctgtcgaaattattgctaatgaacaaggtaacagagtcactccatctttcgttgctttcacccctcaagaaagattgattggtgacgccgccaagaatcaagctgctttgaacccaagaaacactgtcttcgacgctaaaagattgatcggtagaagattcgatgacgaaagtgtccaaaaggacatgaagacttggccattcaaggttattgatgttgatggtaatccagttatcgaagtgcaatacttggaggaaactaagaccttctctccacaagaaatctctgctatggttttgactaaaatgaaagaaattgctgaagcaaagatcggtaagaaagtcgagaaggctgtcatcactgttccagcttacttcaacgatgctcaaagacaagctaccaaagatgctggtgctatctccggtttaaacgtcttaagaatcatcaacgaaccaactgccgctgctatcgcttatggtttgggcgctggtaagtctgaaaaggaaagacacgttttaatcttcgacttgggtggtggtacttttgatgtctctttgttgcacattgccggcggtgtctacactgtcaagagcacttctggtaacacccacttgggtggtcaagattttgacaccaacttgttagaacacttcaaggctgaattcaagaagaagacaggtttggatatttccgatgatgccagagccttacgtcgtttgagaactgctgctgagagagctaagcgtactttatcttctgttactcaaactaccgttgaagttgactctttgtttgacggtgaagatttcgaatcctctttaacccgtgcaagatttgaagacttgaacgctgccttgttcaaatccactttggaacctgttgagcaagttttgaaggacgctaagatttcaaagtctcaaatcgatgaagttgttttggttggtggttccaccagaattccaaaggtccaaaaattgctttccgacttcttcgatggtaagcaattggaaaagtccattaacccagatgaagctgtggcttacggtgctgccgttcaaggtgccattttgaccggtcaatctacctctgacgaaaccaaggatttgttgttattggacgtcgctccattgtccttgggtgtcggtatgcaaggcgacattttcggtattgtcgttccaagaaatactaccgtcccaaccatcaagagaagaactttcactactgtttctgacaaccaaaccactgttcaattcccagtttaccaaggtgaacgtgttaactgtaaggaaaacactttgctaggtgagtttgatttgaagaacatcccaatgatgccagccggtgaaccagtgctagaagccatctttgaagtcgatgccaacggtatcttgaaagttaccgctgttgaaaaatctactggtaaatcttccaacattaccatttctaatgctgttggtagattatcctccgaagaaatcgaaaagatggtcaaccaagccgaagaatttaaagctgctgacgaggcctttgccaagaagcacgaagctagacaaagattggaatcttacgttgcttctattgaacaaacagttactgacccagtcttgtcatccaagttgaagagaggttctaagtccaaaattgaagctgcattgtctgatgctttggctgctttgcaaattgaagatccatccgctgatgaattgagaaaggctgaagttggattaaagagagttgtcaccaaggccatgtcttcccgttaa

SEQ ID NO: 4532 - DNA, 1302 bp, Artificial Sequence
  Optimized genes for Saccharomyces cerevisiae
atggttaacgttgtcttgggttctcaatggggtgatgaaggtaagggtaaattagtcgacttgttagttggtaagtatgatatcgttgctcgttgtgctggtggtaacaacgccggtcacactattgtcgttgatggtgttaagtacgacttccacatgttgccatccggtttggtcaacccaaactgtcaaaacttgctaggtaacggtgttgttattcacgttccatctttcttcaaggaattagaaactctagaagccaaaggtttgaagaacgcaagatcaagattattcgtctcttccagagctcatttggtttttgatttccatcaagttactgacaagttgagagagttggaattgtctggtagatccaaggacggtaagaatatcggtactactggtaagggtattggtcctacttactctaccaaggcctctagatctggtctaagagtccaccacttggtcaacgatcaaccaggtgcttgggaagaatttgttgccagatacaagagattgttggaaaccagaagacaaagatatggtgactttgaatacgatttcgaagctaaattggctgaatacaagaagttaagagaacaattaaagccattcgttgttgactctgttgttttcatgcacaacgctattgaagctaagaagaaaatcttggtggaaggtgccaacgctttgatgttagatattgactttggtacctacccatacgttacctcttctaacactggtatcggtggtgttttgaccggtttaggtatcccaccaagaactatcgacgaaatttacggtgtggtcaaggcttacaccactagagttggtgaaggtccatttccaactgaacaattgaacgaaaatggtgaaaagttgcaaaccattggtgctgaattcggtgtcactaccggtagaaagagaagatgtggttggttggatttggttgtcttgaaatattctactttgatcaacggttacacttctttgaacatcaccaagttggatgttttggacactttcaaagaaattccagtcggtatttcttactccatccaaggtaaaaaattggacttgttcccagaagacttaaacattttgggtaaggtcgaagttgaatataaggttttaccaggctgggaccaagacattactaagatcactaaatacgaagatttgcctgaaaacgccaagaagtacttgaagtacatcgaagattttgtcggtgtcccagttgaatgggttggtacaggtccagctagagaatccatgttgcacaaggaaatcaaataa

SEQ ID NO: 4533 - DNA, 561 bp, Artificial Sequence
  Optimized genes for Saccharomyces cerevisiae
atgggtattgaccacacttctaaacaacacaagagatctggtcacagaactgctccaaagtctgacaacgtttacttgaaattgttggtcaagttgtacactttcttggccagaagaaccgatgctccattcaacaaggtcgttttgaaggctttgtttttgtctaagatcaacagaccaccagtttctgtttccagaattgctagagccttgaagcaagaaggtgccgctaacaagactgttgttgtcgttggtactgtcactgatgatgccagaatctttgaattcccaaagaccaccgttgctgctttgagattcactgccggtgctcgtgctaagattgttaaggctggtggtgaatgtatcaccttggaccaattggctgtcagagctccaaaaggtcaaaacactttgattttaagaggtccaagaaactctagagaagctgttagacacttcggtatgggtcctcacaagggtaaggccccaagaattttgtccactggtagaaagttcgaaagagctagaggtcgtagaagatccaagggtttcaaggtttaa

SEQ ID NO: 4534 - DNA, 435 bp, Artificial Sequence
  Optimized genes for Saccharomyces cerevisiae
atggctggtgtttctgtcagagatgttgccgctcaagacttcatcaacgcttacgcttctttcttgcaaagacaaggtaagttagaagttccaggttacgttgacattgtcaagacttcttctggtaacgaaatgccaccacaagatgctgaaggttggttctacaagagagctgcttctgttgctagacacatctacatgagaaagcaagttggtgtcggtaaattgaacaagttgtacggtggtgctaagtctagaggtgttagaccatacaagcacattgacgcttccggttctattaacagaaaggttttgcaagctttggaaaagattggtattgttgaaatttctccaaagggtggtagaagaatctctgaaaacggtcaaagagacttggacagaattgctgcccaaactttggaagaagatgaataa

SEQ ID NO: 4535 - DNA, 894 bp, Artificial Sequence
  Optimized genes for Saccharomyces cerevisiae
atgtctggtccaccacctccatacgaagaacaatcttctcatttgtatggtcaaccagcttcctctcaagatggtaacgctttcattccagaagatttcaagtactctactgtcgttatttcctgtgaaccaattatcagacaaagattcatgcacaaggtctactccttactatcttgtcaattgttggcctccctttctttctgttactgggcttctgtctccacttctttgcaaaacttcatcatgtcccacattgctttgttctacatctgtatggttgtttccttggtttcatgtatctggttggctgtctctccaagaccagaagactatgaagcctctgttccagagccattgttgactggttcttctgaggaacctgctcaagaacaaagaagattgccatggtacgtcttgagttcttacaagcaaaagttgaccttgttatccattttcactttgtctgaagcttactgtttgtcattggtcactttggcttacgacaaggacactgttttatctgccttattgattactaccattgtcgttgtcggtgtttctttgactgctttgtccgaaagatttgaaaacgttttgaactctgctacttccatctactactggttaaactggggtttgtggattatgattggtatgggtttaaccgctttattattcggttggaacactcactcttccaagttcaacttattatacggttggttgggtgctatcttgtttactgcctacttatttattgatactcaattaatcttcagaaaggtttacccagatgaagaagttagatgtgctatgatgttgtacttggacattgttaacttgttcttgtctattttgagaattttagctaactccaacgatgacaactaa

SEQ ID NO: 4536 - DNA, 1146 bp, Artificial Sequence
  Optimized genes for Saccharomyces cerevisiae
atgaaggaaaatgaattgaaaaacgaaaagtccgtcgatgttttgtcattcaagcaattggaatctcaaaagatcgtcttgccacaagatttgttccgttcttccttcacctggttctgttatgaaatttacaagtctttagctttcagaatctggatgttgctatggttgcctttgtccgtttggtggaaattatctaacaactgtatctacccattgattgtttccttgttagttttattcttaggtccaattttcgttttggtcatctgtggtttgtccagaaagagatctttgtccaagcaattaatccaattttgtaaggaagtcactgaaaacactccatcttctgacccacatgactgggaagttgttgctgccaacttgaactcttacttgtacgaaaacaaggcttggaacaccaagtacttttttttcaacgctatggtttgtcaagaagcctttagaaccactttgttggaaccattctctttgaagaaggatgaagctgctaaagttaagtctttcaaggactctgttccatacattgaagaagctttgggtgtttacttcagagaagttgaaaaacaatggaagttgtttaactccgaaaaatcttggtctccagttggtttagaagatgctaagttaccaaaggaagcttacagattcaaattgacttggtttttgaagagaatttccaacatctttatgttaattccatttttgaacttcttgtgttgtatttacgtttctagaggtatgtgtttgttattgagaactttctacttgggttggattttgttcatgttggttcaaggtttccaaaacatgagaatgattgtcttatctgtcaagatggaacacaagatgcaattcttgtctactatcatcaacgaacaagaatccggtgctaacggttgggacgaaatcgctaagaagatgaacagatacttatttgaaaagaaggtctggaagaacgaggaattcttcttcgatggtattgactgtgaatggttcttctcccacttcttttacagagttctatctgccaagaaatccatgagagctttatccttaaacgtcgaattatggccatacatcaaggaggctcaattgtcttgttctgaagaaagtttggcttaa

SEQ ID NO: 4537 - DNA, 1440 bp, Artificial Sequence
  Optimized genes for Saccharomyces cerevisiae
atgtctgccattttgtctaccacttccaagtctttcttgtccagaggttccaccagacaatgtcaaaacatgcaaaaggctttgtttgccttgttgaatgctagacactactcttctgcaagtgaacaaactttgaaggaaagatttgctgaaatcattccagctaaggctgaagaaatcaagaaattcaagaaggaacatggtaaaactgttattggtgaagtgctattagaacaagcttacggtggtatgcgtggtattaagggtttagtctgggaaggttctgttctagacccagaagaaggtatcagattcagaggtagaactatcccagaaattcaaagagaattgccaaaggccgaaggctctactgaaccattaccagaagcccttttctggttgttattaactggtgaaattccaactgatgctcaagttaaggctttgtccgctgatttagccgctagatctgaaattcctgaacacgttatccaattattggattctttgcctaaggatttgcatccaatggctcaattctctattgccgttactgctttggaatccgaaagtaagttcgccaaggcatacgcccaaggtgtttctaagaaggaatactggtcttacactttcgaagactccttggacttgctaggtaaattgccagtcattgcttccaagatttacagaaacgttttcaaagatggtaagatcacttctaccgatccaaacgctgactacggtaagaacttggctcaattgttgggttacgaaaacaaggacttcatcgatttgatgagattgtacttgactattcactctgaccacgaaggtggtaacgtctctgctcacactactcacttggttggttctgctttatcctctccatacctatctttagctgctggtttgaacggtttggccggtccattgcacggtcgtgctaaccaagaagtcttggaatggttatttaagttgagagaggaagttaaaggtgattactccaaagaaaccattgaaaagtacttatgggacactttaaacgctggtagagttgttccaggttatggtcacgctgttttaagaaagactgacccaagatacacagcacaaagagaattcgctctaaagcatttcccagattatgaattattcaagttagtttccaccatctacgaagttgctcctggtgtcttgactaagcacggtaagaccaagaacccatggccaaatgttgactctcattctggtgttttgttgcaatactacggattgaccgaagcttctttctacaccgttttgttcggtgttgccagagctatcggtgtcttacctcaattgattattgacagagctgtcggtgctccaatcgaaagaccaaagtccttctccactgaaaaatacaaggagttggtcaagaagattgaatctaaaaactaa

SEQ ID NO: 4538 - DNA, 6702 bp, Artificial Sequence
  Optimized genes for Saccharomyces cerevisiae
atgtctgaagaatccctatttgaaagttctcctcaaaagatggaatacgaaattacaaactactctgaacgtcacactgaattgccaggtcacttcatcggtttgaacactgtcgacaagcttgaagaatcaccattaagagactttgttaagtcccacggtggtcatactgtcatttccaagattttgattgctaacaacggtattgctgctgtgaaagaaattcgttctgttagaaaatgggcttatgaaacctttggtgacgacagaaccgtccaattcgttgctatggctactcctgaagacctggaagccaatgctgaatacatcagaatggctgaccaatacattgaagttcctggtggtaccaacaacaataattacgctaacgtcgatttaattgtcgatattgctgaaagagcagatgtcgatgctgtttgggctggttggggtcacgcttcagaaaaccctttgttgccagaaaaattgtctcaatctaagagaaaggtcatctttatcggcccaccaggtaacgctatgagatccttaggtgataagatctcttctactattgttgctcaaagtgctaaagttccatgtatcccatggtctggtactggtgttgacaccgttcatgttgatgaaaagaccggtctagtttccgttgacgatgacatctaccaaaagggttgttgtacctccccagaagatggtttgcaaaaggctaagagaattggtttcccagttatgattaaggctagcgaaggtggtggtggtaagggtatcagacaagttgaaagagaagaagatttcatcgctttgtaccatcaagctgccaatgaaattcctggtagtcctattttcattatgaaattggctggccgtgccagacacttggaagttcaattactagctgatcaatatggtaccaacatttccttgtttggtcgtgactgttctgtgcaaagaagacaccagaaaattattgaagaagctccagtcaccattgccaaagccgaaactttccacgaaatggagaaggctgctgtaagattgggtaaattagttggttacgtttccgctggtactgtggaatacctgtactcccatgatgatggtaagttctacttcttggagttgaaccctcgtttgcaagttgagcatcctaccaccgaaatggtttcaggtgttaacctaccagctgcccaattgcagattgccatgggtattccaatgcacagaatttctgacattagaactttatacggtatgaatccacattctgcctccgaaatcgacttcgaattcaagactcaagatgccaccaagaagcagagaagacctatcccaaagggtcattgtactgcttgtcgtatcacttctgaagacccaaacgacggttttaagccttctggtggtacattgcatgaattaaatttcagatcttccagcaacgtatggggttacttttctgtcggtaacaatggtaacatccactctttttccgattctcagttcggtcacatttttgcttttggagagaacagacaagcttccagaaagcacatggtcgtcgctttgaaggaattatctatccgtggtgattttagaaccactgttgaatatttgatcaagttgttggaaaccgaagactttgaagataatactatcaccactggctggttagatgatttgattactcacaagatgactgctgaaaaaccagatccaaccttggctgttatctgtggtgctgctaccaaggcctttttagcctcggaggaagctagacataaatacatcgaatctttgcaaaaaggtcaagttctatccaaagacctattacaaaccatgttcccagtggattttattcatgagggtaagagatataaattcactgttgctaagtctggtaatgatcgttacacacttttcatcaacggttccaagtgtgatatcattctccggcagttatccgacggtgggttgttgatcgccattggtggtaaatctcacaccatttactggaaggaagaagttgctgctactagattgagcgttgactccatgactactttgctagaagtggaaaacgatccaacccagttgcgtactccatctccaggcaagttggttaagttcttggtcgaaaacggtgaacacattatcaagggccagccatacgctgaaatcgaggtcatgaagatgcaaatgccattggtctctcaagaaaacggaattgttcaattattgaagcaaccaggtagcactatcgttgccggtgacatcatggctatcatgaccctagatgacccatctaaggttaagcacgccttgccattcgaaggtatgttgccagatttcggttctccagtcattgaaggtactaagccagcctacaagttcaaatcattggtttctaccttagaaaacattttgaagggttatgacaaccaagttatcatgaacgcttctctacaacaattgatcgaagtcttacgtaacccaaaactgccatattcagagtggaagttacatatctctgctctacactctcgtttacctgctaagttggacgaacaaatggaagaattggttgctcgttcgttgagaagaggtgctgtctttccagctagacaactgtcgaagctgattgatatggccgtcaagaatccagaatacaacccagacaaactactcggcgcagttgtcgaaccattggccgacattgctcacaagtattctaatggtttagaagctcatgaacactccatcttcgtccatttcttagaagagtactacgaagttgaaaagttgttcaacggtcctaacgtcagagaagagaatattattttgaagttgagagatgaaaacccaaaggacttggataaggtcgctttgacagttttatctcattccaaggtttctgcaaagaacaacttaattttggcaattctgaagcattaccaaccattgtgtaagttgtcctctaaggtttctgctatcttctccaccccactacaacacatcgttgaattggaatccaaagctaccgccaaggtggcgttacaagcaagggaaatcctaatccaaggtgctttgccatccgtcaaggaaagaactgaacaaattgaacatattttaaaatcctccgttgtcaaggtcgcttacgggtcctccaacccaaagcgttccgagcctgatttgaatatcttgaaggacttgattgactctaactatgtcgtcttcgatgttcttttgcaatttttgacccaccaagatcctgtcgttactgcagctgccgctcaagtctatatcagaagagcttacagagcttacaccatcggtgacattagagttcacgaaggtgtcactgtaccaattgttgaatggaaattccaattgccttccgccgccttcagcactttcccaacagtcaaatctaaaatgggtatgaaccgtgctgtctccgtgagtgatctatcttatgttgccaactctcaatcatctccattgagagaaggtattttgatggctgttgaccatttggacgatgttgatgagatcttgagtcaatccttggaagttatcccaagacaccaatcttcaagcaatggtccagctcctgacaggagtggttcttctgcctctttgtccaatgtcgccaacgtttgtgttgcttctactgaaggtttcgaatctgaggaagaaatcttagtcaggttgagagaaattcttgacttaaacaagcaagagttgattaacgcctccattagaagaatcaccttcatgtttggtttcaaggatggttcttacccaaagtactatacttttaacggtccaaactacaacgaaaacgaaacaatcagacatattgagccagcattggctttccaattggaattgggtagactatcaaacttcaacatcaagccaatttttaccgataacagaaacattcacgtttatgaggctgtcagcaaaacctctccattggacaagagatttttcaccagaggaataatacgtaccggccacattagagatgatatctctattcaagaatacttgacttctgaagctaatagattaatgtcagatatattagacaacttggaagtaactgacacttccaactctgatttgaaccacatctttatcaactttattgctgtttttgatatttctccagaggatgtggaagcagcatttggcgggtttttggagagattcggtaagagattattaagattgagggtgtctagtgccgaaataagaatcatcattaaggaccctcaaactggtgccccagttccattgagagccttaatcaacaacgtttccggttacgtcatcaaaacagaaatgtacactgaagttaaaaacgccaagggtgaatgggttttcaagtctttaggtaagccaggttctatgcatttgagaccaattgccactccataccctgttaaagaatggttgcagcctaagagatacaaggctcacttgatgggtactacctacgtttacgatttccctgaactgttcagacaagcttcctcttcccaatggaagaacttctctgctgatgttaagttaaccgacgatttcttcatttctaacgaattgatcgaagacgaaaatggtgaattgactgaggtggagcgtgaaccaggtgcaaatgctattggtatggttgctttcaaaattactgtcaagacaccagaatatccaagaggtcgtcaatttgtcgttgttgccaacgatatcactttcaagatcggttcattcggtccacaggaagacgaattttttaataaggttaccgagtatgctagaaagagaggtattccaagaatttacttagctgcaaacagtggcgctcgtattggtatggcagaagaaattgtcccattatttcaagtagcttggaacgacgctgctaacccagacaaagggttccaatacctatacttgactagtgaaggaatggaaactttaaagaagtttgacaaggaaaactccgtcttgaccgaaagaactgttattaacggtgaagaaagattcgtgatcaagaccatcatcggatctgaagatggcttgggtgttgaatgtttgagaggttccggtcttatcgctggtgctacatcaagagcttaccacgatattttcacaattacccttgttacttgtagatctgttggtatcggtgcctatttagtcagactgggtcaaagagctattcaagttgaaggtcaacctatcatcttgaccggtgctccagccatcaacaaaatgttgggtagagaagtctacacttccaacttgcaactaggtggcacccaaattatgtataacaacggtgtctctcatttaactgccgttgatgatttggccggtgtcgaaaagatcgtcgaatggatgtcctacgttcccgctaaaagaaacatgccagttccaattctagagacaaaggatacttgggatagaccagtcgacttcactccaactaacgatgaaacttacgacgttagatggatgattgaaggtagagaaactgaatctggatttgagtacggtttattcgacaagggctctttctttgaaaccttgtccggttgggccaagggtgtcgtggttggtagagccagattgggtggtattcccttgggcgttattggtgtagaaacgaggactgttgaaaatttgattccagctgatccagctaatcctaactccgctgaaaccctgatccaagaacctggccaagtctggcatccaaattctgctttcaagaccgctcaagccatcaatgacttcaataacggtgagcaattgcctatgatgatcttggctaactggagaggtttctctggtggtcaaagagacatgttcaacgaggttttgaagtacggttccttcattgtagatgctttagtggactacaaacaaccaatcattatttatattccacctactggtgaattgagaggcggttcttgggttgttgttgacccaactattaatgctgaccaaatggaaatgtacgccgatgtcaacgcaagagctggtgttttggaaccacaaggtatggtcggtatcaaatttcgtagagagaaattgttagatacaatgaacagattggatgataaatatagagaactaagatcacaattgtctaacaagtctttggctccagaagtccaccaacaaatctccaagcaattagcagaccgtgaacgtgaacttttaccaatctatggtcaaatctctttgcaattcgctgacttgcacgacagatcttctagaatggttgcaaaaggtgttatttcaaaggagctcgaatggactgaagctagacgtttcttcttctggagattaaggcgtcgtctgaatgaagaatacttgattaaaaggttatcacatcaggtgggtgaagccagcagattggaaaagattgccagaatcagatcctggtacccagcttctgtcgaccacgaagatgacagacaagtggcaacctggattgaagaaaattataagactttggatgacaaattgaaaggtttgaaattagagtctttcgcacaagacttggctaagaaaatcagatctgatcatgacaatgccattgacggtttgtctgaagtcatcaagatgctttccactgatgacaaggaaaagctattgaagactttgaaataa

SEQ ID NO: 4539 - DNA, 765 bp, Artificial Sequence
  Optimized genes for Saccharomyces cerevisiae
atgtctggttacgacagagctttgtctattttctctccagacggtcacatcttccaagttgaatatgctttagaagccgtcaagagaggtacttgtgctgttggtgtcaagggtaagaactgtgttgttttgggttgtgaaagaagatccaccttgaagttgcaagacactagaatcaccccatctaaggtttccaagattgactctcacgtcgttttatctttctccggtttgaacgctgactccagaattttgattgaaaaggctagagttgaagctcaatcccacagattgactttggaagatccagttactgtggaatacttgaccagatacgttgccggtgttcaacaaagatacacccaatctggtggtgtaagaccattcggtgtttctactttaattgctggtttcgacccaagagatgatgaaccaaagttgtaccaaactgaaccttccggtatttactcttcttggtctgctcaaaccattggtagaaactccaagaccgttagagaattcttggaaaaaaactacgatagaaaggaaccaccagctactgtcgaagaatgtgtcaaattgaccgtcagatctttgttggaagttgtccaaactggtgctaagaacattgaaatcactgttgttaagccagattctgacattgttgctttgtcctctgaagaaattaaccaatacgtcactcaaatcgaacaagagaagcaagaacaacaagaacaagataagaagaagaaatctaaccattag

SEQ ID NO: 4540 - DNA, 321 bp, Artificial Sequence
  Optimized genes for Saccharomyces cerevisiae
atgaagtacttggctgcttacttattgttgaacgctgctggtaacactccagatgctaccaagatcaaggctattttggaatccgttggtatcgaaattgaagacgaaaaggtttcttctgttttgtctgctttggaaggtaagtctgtcgatgaattgattactgaaggtaacgaaaaattggccgctgttccagccgccggtccagcttccgctggtggtgctgccgcagcttctggtgacgctgctgctgaagaagaaaaggaagaggaagctgccgaagaatctgatgatgacatgggtttcggtttgttcgattaa

SEQ ID NO: 4541 - DNA, 429 bp, Artificial Sequence
  Optimized genes for Saccharomyces cerevisiae
atgtcccaagctgttaacgccaagaagagagttttcaagacccactcttacagaggtgttgacttggaaaaattattagaaatgtctactgaagatttcgtcaagttagctccagccagagtccgtagaagattcgctagaggtatgacttccaagcctgctggtttcatgaagaaattgagagctgctaagttggctgcccctgaaaacgaaaagccagctccagtcagaactcacatgagaaacatgattattgttccagaaatgatcggttctgttgttggtatttacaacggtaaggctttcaaccaagttgaaatcagaccagaaatgttgggtcactacttgggtgaattctctatcacttacactccagttagacacggtagagccggtgctaccacttctagatttattccattgaaataa

SEQ ID NO: 4542 - DNA, 1263 bp, Artificial Sequence
  Optimized genes for Saccharomyces cerevisiae
atgtctaagggtaaggtctgtttggcttactccggtggtttagatacttccgttatcttagcttggttattggaccaaggttacgaggttgttgctttcatggctaacgtcggtcaagaagaagatttcgatgctgccaaggaaaaggccttgaagattggtgcttgtaagttcgtttgtgttgactgtagagaagattttgtcaaggatatcttgttcccagctgttcaagttaacgctgtctacgaagacgtttacttgttgggtacttctttggctagaccagtcattgctaaggctcaaatcgatgtcgctaagcaagaaggttgtttcgctgtttctcacggttgtactggtaaaggtaacgaccaaattagattcgaattgtccttctacgctttgaagccagatgttaagtgtatcactccatggagaatgccagaattcttcgagagatttgccggtagaaaggacttgttagactatgctgctcaaaagggtatcccagttgcccaaactaaagctaaaccatggtctactgacgaaaaccaagctcacatttcttatgaagctggtattttggaggatcctgacactaccccaccaaaggacatgtggaagttgattgtcgacccaatggacgctcctgatcaacctcaagatttaaccattgactttgaaagaggtttgcctgtcaaattaacttacactgacaacaagacctctaaagaagtctctgttactaagcctttggatgttttcttggccgcttctaacttggccagagctaatggtgttggtagaattgatattgttgaagacagatacatcaacttaaagtccagaggctgttacgaacaagctccattgactgttttgcgtaaggctcatgttgatttggaaggtttgactttggacaaggaagttagacaattgagagactctttcgtcactccaaactactctagattgatctacaacggttcttacttcactcctgaatgtgaatacattcgttctatgattcaaccatctcaaaactctgtcaacggtaccgtcagagttagattatacaagggtaacgttattattttaggtagatctaccaagactgaaaaattgtacgatccaaccgaatcttccatggatgaattaacaggttttttgccaactgataccaccggtttcatcgctatccaagccatcagaatcaagaagtacggtgaatccaagaaaaccaagggtgaagaattgaccttataa

SEQ ID NO: 4543 - DNA, 1047 bp, Artificial Sequence
  Optimized genes for Saccharomyces cerevisiae
atgtctattcctgaaactcaaaagggtgttattttctacgaatctcacggtaagttggaatacaaggatattccagttccaaagccaaaggctaacgaattgttgattaatgttaagtactccggtgtttgtcacactgatttgcatgcttggcatggtgactggccattgcctgttaaattgccattagttggaggccacgaaggtgctggtgtcgttgttggtatgggtgaaaacgtcaagggttggaagattggtgattacgccggtatcaaatggttgaacggttcctgtatggcttgtgagtactgtgaattaggtaatgaatccaactgtccacacgctgacttgtctggttacactcacgatggttctttccaacaatacgctactgctgatgctgttcaagctgctcatatcccacaaggtaccgatttagctcaagttgctccaattttgtgtgctggtattactgtttacaaagctttgaaatctgccaacttgatggccggtcactgggttgccatctctggtgccgctggtggtttaggctctttggctgtccaatatgccaaggctatgggttacagagttttgggtattgatggtggtgaaggtaaagaagaattgttcagatctatcggtggtgaagtttttattgacttcaccaaggaaaaggacattgttggtgccgtcttgaaggccactgacggtggtgctcacggtgtcatcaacgtttccgtttctgaagctgccattgaagcctctactagatacgttagagccaatggtactaccgttttggttggtatgccagctggtgctaagtgttgttctgatgttttcaaccaagtcgttaagtccatttccatcgttggttcttacgtcggtaacagagctgacaccagagaagctttggatttcttcgctagaggtttggtcaagtctccaatcaaggttgtcggtttgtccactttgccagaaatttatgaaaagatggaaaaaggtcaaattgtcggtagatatgttgttgacacttctaaataa

SEQ ID NO: 4544 - DNA, 342 bp, Artificial Sequence
  Optimized genes for Saccharomyces cerevisiae
atgtctgaaattcaaaacaaggctgaaactgctgctcaagatgttcaacaaaagttggaagaaactaaggaatctttgcaaaataagggtcaagaagttaaagaacaagccgaagcatctattgacaacttgaagaacgaagctactccagaagctgaacaagttaagaaggaggaacaaaacattgctgatggtgttgagcaaaaaaagactgaagccgctaacaaggttgaagaaaccaagaagcaagcttctgctgctgtttccgaaaagaaggaaacaaagaaggaaggtggtttcttgaaaaaattgaacagaaagatcgcttccattttcaactaa

SEQ ID NO: 4545 - DNA, 561 bp, Artificial Sequence
  Optimized genes for Saccharomyces cerevisiae
atgggtattgaccacacttctaagcaacacaagagatctggtcacagaactgccccaaagtctgacaacgtttacttgaagttgttggttaaattgtacactttcttggccagacgtactgatgctccattcaacaaggtcgttttgaaggctttattcttatccaagatcaacagaccaccagtttctgtttcccgtattgctagagccttgaaacaagaaggtgctgccaacaagactgttgttgtcgttggtactgtcaccgatgatgccagaattttcgaattcccaaagaccaccgttgctgctttgagattcactgctggtgcccgtgctaagattgtcaaggccggtggtgaatgtatcaccttggaccaattggctgttagagctccaaaaggtcaaaacactttgattttgcgtggtccaagaaactccagagaagctgtcagacacttcggtatgggtcctcacaagggtaaggctccaagaatcttgtctactggtagaaagtttgaaagagctagaggtagaagaagatccaagggtttcaaggtttaa

SEQ ID NO: 4546 - DNA, 429 bp, Artificial Sequence
  Optimized genes for Saccharomyces cerevisiae
atggctccatctgctaaggccactgccgccaagaaggctgttgttaagggtaccaacggtaagaaagctttaaaggtcagaacttccgctactttcagattgccaaagaccttgaagttggctagagctccaaaatacgcttccaaggccgttccacactacaaccgtttggactcttacaaggttattgaacaaccaattacttctgaaaccgctatgaagaaagttgaagatggtaacattttggttttccaagtttccatgaaagccaacaagtaccaaatcaagaaggctgtcaaggaattgtacgaagttgatgttttgaaggttaacactttggtcagaccaaatggtactaagaaggcttacgttagattgactgctgactacgatgctttggatattgctaacagaattggttacatttaa

SEQ ID NO: 4547 - DNA, 321 bp, Artificial Sequence
  Optimized genes for Saccharomyces cerevisiae
atgtctactttgttgaagtctgctaaatctattgttccattgatggacagagttttggttcaaagaatcaaggctcaagccaagactgcttctggtttgtacttgccagaaaagaacgttgaaaaattgaaccaagctgaagttgttgctgtcggtccaggtttcactgacgctaacggtaacaaggtcgttcctcaagttaaggttggtgaccaagtcttgattccacaattcggtggttctaccattaagttgggtaacgatgatgaagtcatcttgttcagagatgctgaaattttggctaagattgctaaggattaa

SEQ ID NO: 4548 - DNA, 186 bp, Artificial Sequence
  Optimized genes for Saccharomyces cerevisiae
atggatggtatgttcgctatgccaggtgctgctgccggtgccgcttctcctcaacaaccaaagtctagattccaagctttcaaggaatctccattgtacaccattgctttgaacggtgctttcttcgttgctggtgttgccttcatccaatctccattgatggacatgttggctccacaattgtaa

SEQ ID NO: 4549 - DNA, 1164 bp, Artificial Sequence
  Optimized genes for Saccharomyces cerevisiae
atgtctcacagaaaatacgaagctccaagacatggtcatttgggctttttgccaagaaagagagctgcttccatcagagccagagtcaaggctttcccaaaggacgaccgttccaagccagttgccttgacctccttcttgggttataaggccggtatgactactattgttagagacttggatagaccaggttccaagttccacaagcgtgaagttgtcgaagccgtcactgttgtcgatactccaccagtcgtcgttgttggtgttgtcggttacgttgaaactcctcgtggtttaagatctttgactaccgtctgggccgaacacttgtctgatgaagttaaaagaagattctacaaaaactggtacaagtctaagaagaaagccttcactaagtactctgctaagtacgctcaagatggtgctggtattgaaagagaattggctcgtatcaagaagtatgcttctgttgttcgtgttttggttcacactcaaatccgtaagacaccattggcccaaaagaaggctcacttagctgaaatccaattgaacggtggttctatttctgaaaaagttgactgggctagagaacatttcgaaaagactgtcgctgttgattccgttttcgaacaaaacgaaatgattgatgctattgctgtcaccaagggtcacggttttgaaggtgtcactcacagatggggtactaaaaagttgccaagaaagactcatagaggtttgagaaaggttgcttgtatcggtgcttggcatccagcccacgttatgtggtctgtcgcaagagctggtcaaagaggttaccactctagaacttctatcaaccacaagatctacagagttggtaaaggtgatgacgaagctaatggtgccacctctttcgacagaaccaagaagaccattactccaatgggtggtttcgtccactacggtgaaattaagaacgatttcatcatggttaagggttgtattccaggtaacagaaagagaatcgttactttgagaaagtccttgtacaccaacacttccagaaaagctttggaagaagtctctttgaaatggattgacactgcttctaaattcggtaagggtagattccaaaccccagctgaaaagcacgctttcatgggtaccttgaagaaggatttgtaa

SEQ ID NO: 4550 - DNA, 573 bp, Artificial Sequence
  Optimized genes for Saccharomyces cerevisiae
atgtctgccccacaagccaagatcttgtctcaagctccaactgaattggaattacaagtcgctcaagctttcgttgaattagaaaactcttctccagaattgaaggctgaattgagaccattgcaattcaagtctatcagagaaatcgatgttgctggtggtaaaaaagctttggctattttcgtcccagttccatctttggccggtttccacaaggttcaaaccaagttgaccagagagttggaaaagaagttccaagacagacacgttatcttcttggctgaaagaagaattttgccaaagccatcccgtacttctagacaagttcaaaagcgtccaagatccagaactttgactgctgtccacgacaagatcctagaagatttggttttcccaaccgaaattgttggtaagagagttagatacttggtcggtggtaacaagattcaaaaagttttgttggactccaaggatgtccaacaaattgactacaagttggaatctttccaagctgtttacaacaaattgactggtaagcaaatcgtttttgaaattccatctgaaactcattaa

SEQ ID NO: 4551 - DNA, 381 bp, Artificial Sequence
  Optimized genes for Saccharomyces cerevisiae
atgtcttggcaagcttacactgataacttgattggtactggtaaggttgacaaggctgttatttactctagagccggtgacgctgtctgggctacttctggtggtttgtctttgcaaccaaacgaaatcggtgaaattgttcaaggtttcgacaacccagctggtttacaatctaacggtttgcacattcaaggtcaaaagttcatgttgttgagagctgatgacagatctatctacggtagacacgatgctgaaggtgttgtttgtgttagaactaagcaaactgtcattattgctcactacccaccaactgttcaagctggtgaagctaccaagatcgttgaacaattggctgactacttgatcggtgtccaatactaa

SEQ ID NO: 4552 - DNA, 2529 bp, Artificial Sequence
  Optimized genes for Saccharomyces cerevisiae
atggtcgctttcactgtggatcaaatgagatccttgatggacaaggttaccaacgttagaaacatgtctgtaattgctcatgttgaccatggtaagtccactttgacagattctttggttcaacgtgccggtattatctctgctgctaaagctggcgaagctagattcaccgacaccagaaaggacgaacaagagagaggtatcaccatcaaatccacagccatttctttatactctgaaatgtccgatgaagacgttaaagaaattaagcaaaagaccgatggtaactccttcttgattaacttgatcgactccccaggtcacgttgatttctcttctgaagttactgccgctttgcgtgtcactgatggtgctttggttgtcgtcgataccattgaaggtgtttgtgtccaaactgaaaccgttttgagacaggccttgggtgaaagaatcaagcctgtggtcgttatcaacaaggttgacagagctcttttggaattacaagtctccaaggaagatctgtaccaaacatttgctagaactgttgaatctgttaatgttattgtttccacctacgctgacgaggttctaggtgatgttcaagtttacccagcccgtggtactgttgcttttggttccggtttgcatggctgggcttttactatcagacaattcgctactagatacgctaagaagttcggtgtcgacaaggccaagatgatggatagattatggggtgactcattcttcaacccaaagactaagaaatggactaacaaagacactgacgctgaaggtaagccattggaaagagctttcaatatgttcatcttggaccctattttcagattattcaccgccatcatgaacttcaagaaggatgaaatcccagtcttgttggaaaaattggagattgttttgaagggtgacgaaaaggatttagaaggtaaggctttgttgaaggtcgttatgcgtaagtttttgccagctgccgatgctctattggaaatgattgtcttacatttaccatctcctgtcaccgctcaagcctaccgtgctgagcaattgtacgaaggaccagctgacgatgccaactgtatcgctatcaagaactgtgatccaaaggccgacttgatgttgtacgtttctaaaatggttccaacatccgacaaaggtcgtttctacgcctttggtagagtttttgccggtaccgtcaaatctggtcaaaaagttcgtatccaaggtccaaactacgtcccaggtaaaaaagatgatttgtttatcaaggctattcaaagagttgttttaatgatgggtagatttgttgaaccaattgatgactgtcctgctggtaacatcattggtctagtcggtattgaccaatttttactaaaaactggtaccttgaccacttccgaaactgctcacaacatgaaggtcatgaaattctccgtttctccagttgtgcaagtggccgttgaagttaagaatgctaacgatttgccaaagttagttgagggtttaaagagattgtccaagtctgatccatgtgttttgacttacatgtctgaaagtggtgaacatatcgttgcaggtactggtgagctacatttggaaatctgtttgcaagatctagaacacgatcatgctggtgttcctttgaagatctctccaccagttgttgcttacagagaaacagtggaatcagaatcctctcaaactgctttatccaaatcaccaaataagcacaacagaatttacttgaaagctgaacctatcgatgaagaagtctctttggctatcgaaaacggtatcatcaatccaagagacgacttcaaagccagagctcgtattatggctgatgactacggttgggatgttactgacgccagaaagatttggtgtttcggcccagacggtaatggtccaaacttagtcattgaccaaaccaaggctgtccaatacctacacgaaattaaggactctgttgttgccgccttccaatgggccaccaaggaaggtccaatcttcggtgaagaaatgagatctgtcagagtcaacattttggatgtcactttgcacgctgatgctattcacagaggtggtggtcaaattattccaaccatgagaagagccacttatgctggtttcttattggccgatcctaaaattcaagaaccagtcttcttggtcgaaatccaatgtccagaacaagctgttggtggcatctactccgtcttgaacaagaagcgtggccaagttgtcagtgaagaacaaagaccaggcactccattgttcactgtcaaggcttacttacctgttaacgaatctttcggttttaccggtgaattgagacaagctaccggtggtcaagctttcccacaaatggttttcgaccactggtctactttaggttctgacccattagacccaacttctaaggctggtgaaattgtattagctgctagaaagagacacggtatgaaggaggaagttccaggttggcaagaatactacgataagttgtaa

SEQ ID NO: 4553 - DNA, 1110 bp, Artificial Sequence
  Optimized genes for Saccharomyces cerevisiae
atgttgagaaatactttcttcagaaacacttccagaagattcttggctactgttaagcaaccatccatcggtagatacaccggtaagccaaatccatctactggtaagtacactgtctccttcatcgagggtgacggtattggtccagaaatttccaagtctgtcaagaagattttctccgctgctaatgttccaattgaatgggaatcttgtgatgtttctccaatctttgttaacggtctaaccactattccagacccagctgtccaatctattaccaagaacttggttgctttgaagggtccattggccactccaattggtaaaggtcacagatctttgaatttgactttaagaaagaccttcggtttatttgctaacgtcagacctgctaagagtattgaaggtttcaagactacttacgaaaatgtcgacttggtcttgatcagagaaaacaccgaaggtgaatactctggtatcgaacacattgtctgcccaggtgtcgttcaatccattaagttgatcaccagagatgcttctgaaagagtcatccgttacgcttttgaatatgctagagctatcggtagaccaagagttattgttgttcacaagtccaccattcaaagattggctgatggtttgtttgtcaacgttgccaaggaattatctaaggaatacccagatttaactttggaaactgaattgattgacaactctgttttaaaggttgtcaccaacccaagtgcttacactgacgctgtttccgtttgtccaaacttgtacggtgatattttgtctgatttgaactccggtttgtccgccggttccttgggtttgaccccatctgccaacattggtcataagatctctatcttcgaagctgtccacggttctgctccagatatcgctggtcaagacaaggctaacccaactgctttattgttgtcttccgtcatgatgttaaaccacatgggtttgactaaccatgctgaccaaatccaaaacgctgttttgagtacaattgcttccggcccagaaaacagaactggtgacttagctggtactgccaccacctcttctttcactgaagccgttatcaagagattataa

SEQ ID NO: 4554 - DNA, 192 bp, Artificial Sequence
  Optimized genes for Saccharomyces cerevisiae
atggctaaggttcacggttctttggctagagctggtaaggtcaagtctcaaactccaaaagttgaaaagactgaaaaaccaaagaagccaaagggtagagcttacaagagattgttgtacaccagaagattcgtcaacgttactttggttaacggtaaaagaagaatgaacccaggtccatctgttcaataa

SEQ ID NO: 4555 - DNA, 1314 bp, Artificial Sequence
  Optimized genes for Saccharomyces cerevisiae
atgccaaagaaggtttggaagtcctccactccatctacttacgaacacatttcttctttgagacctaagtttgtctccagagttgacaacgtcttgcatcaaagaaagtctttaactttctccaacgttgtcgttccagataagaagaacaacaccttgacatcttccgttatctactctcaaggttctgatatctatgaaatcgacttcgctgttccattgcaagaagccgctagtgaaccagtcaaggattacggtgacgctttcgaaggtatcgaaaatacttcattatccccaaagttcgtttaccaaggtgaaactgtttccaagatggcttacttggacaagaccggtgaaaccactttgttgtccatgtctaagaacggttccttggcttggttcaaggaaggtattaaggtcccaatccatattgtccaagaattgatgggtccagctacctcttacgcttccattcactctttgactagaccaggtgatttgccagaaaaggacttttccttggccatttccgatttcggtatctctaacgatactgaaaccattgttaagagtcaatctaatggtgacgaagaagactctattttgaagatcattgacaatgctggtaaaccaggtgaaattttaagaaccgttcacgttcctggtaccaccgtcactcacactgttagattctttgacaaccacatctttgcttcttgttccgacgataacatcttgcgtttctgggacaccagaacttctgacaaacctatctgggttttgggtgagccaaaaaacggtaagttgacttctttcgactgttctcaagtttctaacaatttgtttgttactggtttctctaccggtattatcaagttatgggatgccagagctgctgaagctgccactactgacttgacctacagacaaaatggtgaagatccaattcaaaacgaaattgctaacttctaccatgccggtggtgattctgttgttgatgttcaattttctgctacttcctcttccgaattcttcactgtcggtggtactggtaacatttaccactggaacactgattattctttgtctaagtacaacccagacgacactatcgctccaccacaagatgctactgaagaatcccaaaccaagtcattgagattcttgcacaagggtggctctagaagatctccaaagcaaattggtagaagaaacactgctgcttggcatccagttattgaaaacttggttggtactgtcgatgatgactccttggtctctatctacaagccatacaccgaagaatctgaataa

SEQ ID NO: 4556 - DNA, 324 bp, Artificial Sequence
  Optimized genes for Saccharomyces cerevisiae
atggctgaatctcacagattgtatgtcaagggtaagcacttgtcttaccaaagatctaagagagttaacaacccaaacgtttctttgatcaagattgaaggtgtcgctactccacaagaagctcaattctacttgggtaaaagaattgcttacgtttacagagcttccaaggaagttagaggttctaagatcagagtcatgtggggtaaggttaccagaactcacggtaactctggtgttgttcgtgctaccttcagaaacaacttgccagctaagactttcggtgcttctgtcagaatcttcttgtacccatctaacatttaa

SEQ ID NO: 4557 - DNA, 633 bp, Artificial Sequence
  Optimized genes for Saccharomyces cerevisiae
atgttgcaatctgttgttttctttgctttgttgaccttcgcttcttccgtttctgctatctactctaacaacactgtttccaccactaccaccttggctccatcttactccttggtcccacaagaaactaccatttcctacgctgatgacactactactttcttcgtcacttccactgtctacagtacctcctggttcacttctacatccgctactatcactaatgctgcttcttcatctttgtctacctcttctgcctctggttctgtcaccccagaatctactcacgaaattactagtactagcactattacatctactttgttattgactttgcacgattctaccacattgtccccatcctctactgctgcctccgtctctgatgaagactctaataacaaggatgctaaggttaagtctttcgaacaagcttccacctccaacggttgtgttccaattaccaagttcgttaccgttactaacgaaccagttacccaatacgttactgttactccaaacacaaccactcaatatgtcaccgtcactggtgctccttccgtgactacaacttctccaggtaacgttcaatggtacaacaccacttccatcaccaactccacttcttggtga

SEQ ID NO: 4558 - DNA, 2523 bp, Artificial Sequence
  Optimized genes for Saccharomyces cerevisiae
atggctgaaaaagaagaagccattttcagatccgctgaaatggccttggttcaattttacatccctcaagaaatttccagagattctgcttacaccttgggtcaattgggtttggtccagtttagagacttgaacagtaaagttagagctttccaaagaacttttgtcaacgaaatcagaagattggataacgttgaaagacaatatagatacttctactccttgttgaagaagcacgatattaaattgtacgaaggtgatactgataagtacttggacggttccggtgaactgtacgttccaccatctggttccgtcatcgacgactacgtcagaaacgcctcatacttggaagaacgtttgatccaaatggaagatgctaccgaccaaatcgaagtccaaaagaacgatttggaacagtacagattcattttgcaaagtggtgacgaatttttcttgaagggtgacaacactgactctacttcttacatggatgaagatatgattgacgccaacggtgaaaacattgctgctgccatcggtgcttctgttaactacgtcaccggtgtcattgctcgtgacaaggttgctactctagaacaaatcttatggagagttttgagaggtaacttattcttcaagaccgtcgaaattgaacaaccagtctacgacgtcaaaacccgtgaatataagcataagaatgcctttattgtcttttctcacggtgatttgattatcaagagaattagaaaaattgccgaatctttagatgccaatttgtacgatgttgactcctccaatgaaggtagatctcaacaattagctaaggtcaacaagaacttgtctgacttgtatactgtcttgaaaactacctctaccactttggaaagtgaattatacgctattgcaaaggaattggactcttggttccaagatgttaccagagaaaaggctatctttgagattttgaataagtctaactatgacactaacagaaagatcttgatcgctgagggttggattccaagagacgaattggccactttgcaagctagactaggtgaaatgatcgccagattaggtattgatgtcccatccatcatccaagttttagacaccaaccacactccaccaaccttccacagaaccaacaaatttactgccggtttccaatctatctgtgactgttacggtattgctcaatacagagaaatcaatgctggtttaccaactatcgttactttcccattcatgttcgctattatgtttggtgacatgggtcacggttttttgatgactttagccgctctatcattggtgttgaacgaaaagaagattaacaagatgaaacgtggtgaaattttcgatatggctttcactggtcgttacattattttattaatgggtgttttctcaatgtacactggtttcttgtacaacgacattttttccaagactatgaccatcttcaagtccggctggaaatggccagaccactggaagaaaggtgaatctattactgctacatctgtcggtacctacccaattggtctagattgggcttggcatgggaccgaaaacgctttgttgttctccaactcctacaaaatgaagttgagcatcttgatgggttttatccacatgacttactcttatttcttctctttggctaaccatttgtacttcaactctatgattgacatcattggtaacttcatcccaggcctacttttcatgcaaggtatcttcggttacctaagtgtctgtattgtttacaagtgggctgtcgactgggttaaggatggtaagccagctccaggtttgttaaacatgttgattaatatgttcttatctccaggtactatcgatgatgaactatatccacatcaagccaaggttcaagtcttccttttgctaatggctttagtttgtatcccatggttattgttggtcaagcctttgcatttcaaattcacccacaagaagaaatctcacgaaccattgccttccactgaagctgacgcttcctctgaagacttagaagcccaacaactgatttctgctatggacgctgatgacgctgaagaagaggaagttggttctggttctcatggtgaggatttcggcgatatcatgattcaccaagttatccatactattgaattctgtttgaactgtgtttcccacaccgcttcttacttaagattgtgggccctatctttggctcacgctcaattgtcctccgttctatggaccatgaccattcaaattgccttcggtttcagaggtttcgttggtgtttttatgactgttgctttgtttgccatgtggtttgctttgacttgtgccgtcttggttttgatggaaggtactagtgctatgttgcactctttgagattacattgggttgaatccatgtctaagttctttgttggcgaaggtttgccatacgagccatttgcttttgaatacaaggacatggaggtcgctgttgcctctgcctcttcttccgcctcctcataa

SEQ ID NO: 4559 - DNA, 420 bp, Artificial Sequence
  Optimized genes for Saccharomyces cerevisiae
atgtggaaggctgttatgaatgcttggaacggtactgaatctcaatccaagaacgtctccaacattcaatcttactcatttgaagatatgaagagaattgtcggtaagcacgatccaaacgttgttttggttgatgttagagaaccatctgaatactccattgttcacattccagcttccatcaacgttccatacagatctcacccagatgctttcgctttggacccattggaattcgaaaagcaaattggtatcccaaagccagactctgctaaggaattgattttctactgtgcctctggtaaaagaggtggtgaagctcaaaaggttgcttcttcccacggttactctaacacttctttgtacccaggttccatgaacgactgggtttctcatggtggtgacaagttggatttgtaa

SEQ ID NO: 4560 - DNA, 318 bp, Artificial Sequence
  Optimized genes for Saccharomyces cerevisiae
atgttgatgccaaaggaagacagaaacaagattcaccaatacttattccaagaaggtgttgttgtcgccaagaaggatttcaaccaagctaagcacgaagaaattgacaccaagaacttgtacgttatcaaggctttgcaatctttgacctccaagggttacgtcaagactcaattctcttggcaatattactactacactttgactgaagaaggtgtcgaatacttgagagaatatttgaacttgccagaacacattgttccaggtacttacattcaagaaagaaacccaacccaaagaccacaaagaagatactaa

SEQ ID NO: 4561 - DNA, 1236 bp, Artificial Sequence
  Optimized genes for Saccharomyces cerevisiae
atgtcttccgctgctaccaaagctactttctgtatccaaaatggtccatccttcgaaggtatttctttcggtgctaacaagtctgttgctggtgaaaccgttttcaccacttctttggtcggttacccagaatccatgactgatccatcttaccgtggtcaaatcttggttttcactcaaccattgatcggtaactacggcgttccttccggtgaagctagagatgaatacaacttattgaaatactttgaatctccacatatccacgttgttggtattgttgtcgctgaatacgcttaccaatattctcactggactgccgttgaaagtttggcccaatggtgtcaacgtgaaggtgttgctgccattactggtgtcgacaccagagaattagttcaatacttgagagaacaaggttcttcattaggtagaatcactttagctgaccacgatcctgttccatacgtcaacccaatgaagaccaacttggttgctcaagttactactaagaagccattccacgtctctgctttgcctggtaaggctaaggctaatgttgcattgattgactgtggtgttaaggaaaacatcatcagatgtttagtcaagagaggtgccaacgtcactgtcttcccatacgactacagaattcaagatgttgcctctgaattcgatggtattttcttgtctaacggtccaggtaatccagagttgtgtcaagccaccatttccaatgtcagagaattgttgaacaacccagtttacgattgtattccaatttttggtatctgtttgggtcaccaattattggctttggcttctggtgcttccactcacaagttgaagtacggtaacagagctcacaacatcccagctatggacttgactaccggtcaatgtcacattacctcccaaaaccacggttatgctgttgacccagaaactttgccaaaggaccaatggaagccttacttcgttaacttgaatgacaaatccaacgaaggtatgattcacttgcaaagaccaatcttctctacccaattccatccagaagccaagggtggtcctttggacactgctattttgtttgataagttcttcgacaacattgaaaagtatcaattgcaatctcaagctaaatcttctatctctttgaaggttacttactctactgacaagtccagattgcaatccatcaacgttaccaagctagccaaagaaagagttttgttctaa

SEQ ID NO: 4562 - DNA, 702 bp, Artificial Sequence
  Optimized genes for Saccharomyces cerevisiae
atgtcttctgccattactgctttgactccaaaccaagttaacgacgaattgaacaaaatgcaagctttcatcagaaaagaagctgaagaaaaggccaaggaaattcaattgaaagctgaccaagaatatgaaattgaaaagaccaatattgtcagaaacgaaaccaacaacattgacggtaacttcaagtccaagttgaagaaggctatgttgtctcaacaaatcaccaagtctaccattgctaacaagatgagattaaaggttttgtctgctagagaacaatctttggatggtattttcgaagaaactaaggaaaaattgtccggtatcgctaataacagagatgaatacaagccaattttgcaatccttgattgttgaagccttgttaaaattattggaaccaaaggctatcgtcaaggctttagaaagagacgttgacttgatcgaatccatgaaggacgatatcatgcgtgaatacggtgaaaaggctcaaagagctccattggaagaaatcgttatttctaacgattacttgaacaaggatttggtttctggtggtgttgttgtctccaacgcttctgacaagattgaaatcaacaacactttggaggaacgtttgaagttgttgtctgaagaagctttgccagctattagattggaattatatggtccatctaagactagaaagttcttcgattaa

SEQ ID NO: 4563 - DNA, 432 bp, Artificial Sequence
  Optimized genes for Saccharomyces cerevisiae
atgtctgatgttgaagaagttgttgaagttcaagaagaaactgttgtcgaacaaactgctgaagtcaccattgaagatgctttgaaggtcgttttgagaactgccttggtccacgatggtttggccagaggtctacgtgaatctaccaaggctttgaccagaggtgaagctttgttggtcgtcttggtttcttctgttactgaagccaacattattaagttggtggaaggtttggctaacgacccagaaaacaaggttccattgatcaaggttgctgacgctaagcaattgggtgaatgggctggtttaggtaagattgacagagaaggtaacgctagaaaggttgttggtgcttctgtcgttgttgtcaagaactggggtgccgaaaccgatgaattgtccatgatcatggaacacttctctcaacaataa

SEQ ID NO: 4564 - DNA, 1365 bp, Artificial Sequence
  Optimized genes for Saccharomyces cerevisiae
atgtctgaaccagaattccaacaagcctacgaagaagttgtctcttctttagaagactctactttgtttgaacaacatccagaatatagaaaggttttgccaattgtctccgttcctgaaagaattattcaattcagagttacttgggaaaatgacaagggtgaacaagaagtcgctcaaggttacagagtccaatacaactctgctaagggtccatacaaaggtggtttgagattccacccatctgttaacttgtctattttgaagttcttgggtttcgaacaaatcttcaagaactccttgaccggtttggacatgggtggtggcaagggtgggttgtgtgtcgatttgaaaggtagatctaacaacgaaatcagaagaatctgttacgctttcatgagagaattgtccagacacatcggtcaagatactgatgttccagctggtgatattggtgttggtggtcgtgaaattggttacttgttcggtgcttacagatcctacaagaattcttgggaaggtgtcttgactggtaagggcttgaactggggtggttctttgattagacctgaggctactggttatggtttggtttactacacccaagctatgattgactatgccaccaacggtaaggaatcttttgagggtaaaagagttaccatttctggttctggtaacgttgctcaatatgctgctctaaaagttattgaattaggtggtactgttgtttctctatctgactccaagggttgtattatctccgaaaccggtattacttctgagcaagttgctgacatttcctctgccaaggtcaacttcaaatctttggaacaaattgttaatgaatactctactttctctgaaaacaaggttcaatacattgccggtgctagaccatggactcacgttcaaaaggttgatatcgctttaccatgtgctactcaaaacgaagtttccggtgaagaagccaaagctttggtcgcccaaggcgttaagtttattgctgaaggttccaacatgggttcaactccagaagctattgctgtttttgaaactgctcgttccactgccactggcccaagtgaagctgtctggtacggtccaccaaaggctgccaatttgggtggtgttgccgtcagtggtttggaaatggctcaaaattctcaaagaattacctggacctctgaacgtgttgaccaagagttgaagagaatcatgatcaactgtttcaacgaatgtatcgactacgccaagaagtacactaaggatggtaaggttctaccatccttagtcaagggtgccaacattgcttctttcatcaaggtctctgatgccatgttcgatcaaggtgacgttttctaa

SEQ ID NO: 4565 - DNA, 1197 bp, Artificial Sequence
  Optimized genes for Saccharomyces cerevisiae
atgtctcaaaacgtttacattgtttccactgccagaactccaattggttctttccaaggttccttgtcttctaagactgctgtggaattaggtgctgtcgcattgaagggtgctttggccaaggtcccagaattggatgcctccaaggactttgacgaaattattttcggtaacgtcttatctgccaacttaggccaagctcctgctagacaagttgccttagctgctggtttgtccaaccacattgttgcttctaccgtcaacaaggtttgtgcctctgctatgaaggctatcattttgggtgctcaatctattaagtgtggtaatgctgacgtcgttgttgcaggtggttgtgaatccatgaccaacgctccatactacatgccagccgccagagctggtgctaagtttggtcaaactgtcttggtcgatggtgtcgaaagagatggtttgaacgatgcttacgatggcttagccatgggtgttcacgctgaaaaatgtgctagagactgggatatcaccagagaacaacaagataacttcgctattgaatcttaccaaaagtcccaaaagtctcaaaaagaaggtaagttcgacaacgaaatcgttccagttactatcaagggtttcagaggtaagccagacactcaagtcaccaaggatgaagaaccagctagattgcacgttgaaaaattgagatctgcaagaaccgttttccaaaaggaaaacggtactgttaccgctgctaacgcctctccaatcaacgacggtgccgctgctgttattttggtttctgaaaaggttttgaaggaaaagaacttgaaaccattggctatcatcaaaggttggggtgaagccgctcaccaaccagctgatttcacttgggctccatctttggctgttccaaaggccttgaagcacgccggtatcgaagatattaactccgttgactactttgaattcaacgaagctttctctgttgttggtttagttaacactaagatcttaaagttggacccatccaaagttaatgtctacggtggtgccgtcgctttgggtcacccattaggctgttctggtgcgagagttgtcgtcactttgttgtccatcttgcaacaagaaggtggtaaaatcggtgttgctgccatctgtaacggcggtggtggtgcatcttccattgtcattgaaaagatttaa

SEQ ID NO: 4566 - DNA, 474 bp, Artificial Sequence
  Optimized genes for Saccharomyces cerevisiae
atgccaattgaccaagaaaaattggctaagctacaaaagttgtctgccaacaacaaggtcggtggtaccagaagaaagttgaacaagaaggctggttcttctgctggtgctaataaggatgacaccaagttacaatctcaattggccaagttgcacgctgttactatcgacaacgttgctgaagctaacttcttcaaggacgatggtaaggttatgcacttcaacaaagttggtgttcaagttgccgcccaacacaacacttctgttttctacggtttgccacaagagaagaacttgcaagatttgttcccaggtattatttctcaattgggtccagaagccattcaagctttgtcccaattagctgctcaaatggaaaagcacgaagctaaagctccagctgatgctgaaaagaaagatgaagctattccagaattggtcgaaggtcaaactttcgacgctgacgttgaataa

SEQ ID NO: 4567 - DNA, 483 bp, Artificial Sequence
  Optimized genes for Saccharomyces cerevisiae
atgggtaaatctcatggttacagatctagaaccagatacatgttccaaagagatttcagaaagcacggtgctgtccacatgtctacttacttgaagatctacaaggtcggtgacatcgttgacattaaggctaacggttctattcaaaagggtatgccacacaagttctaccaaggtaagactggtgttgtttacaacgttaccaagtcttctgttggtgttatcatcaacaagatggttggtaacagatatttagaaaagagattgaacttgagagttgaacacatcaagcattccaagtgtcgtcaagaattcttggaaagagtcaaggccaacgctgccaagagagctgaagctaaggctcaaggtgtcgctgttcaattgaaaagacaaccagctcagccaagagaatccagaattgtttccactgaaggtaacgtcccacaaactttggctccagttccatacgaaactttcatctaa

SEQ ID NO: 4568 - DNA, 711 bp, Artificial Sequence
  Optimized genes for Saccharomyces cerevisiae
atgaaattgaacatttcctacccagttaacggttctcaaaagactttcgaaatcgatgacgaacacagaattagagtttttttcgacaagcgtattggtcaagaagtcgacggtgaagctgttggtgatgaattcaagggttacgttttcaagatttctggtggtaacgacaaacaaggtttcccaatgaagcaaggtgttttgttgccaaccagaatcaagttgttattgaccaagaacgtttcttgttacagaccaagaagagatggtgagagaaagagaaaatctgttagaggtgctattgtcggtccagatttggctgtcttggccttggttattgttaagaagggtgaacaagaattggaaggtttgactgacaccactgttccaaaaagattgggtccaaagagagctaacaacatcagaaagttcttcggtttatccaaggaagatgatgtcagagacttcgttatcagaagagaagttactaaaggtgaaaaaacttacactaaggctccaaagatccaacgtttggtcactccacaaagattgcaaagaaagagacaccaaagagctttgaaggttagaaacgcccaagctcaacgtgaagccgctgctgaatacgctcaattgttagctaagagattatctgaaagaaaggccgaaaaggctgaaattcgtaaacgtagagcctcttctttgaaagcttaa

SEQ ID NO: 4569 - DNA, 894 bp, Artificial Sequence
  Optimized genes for Saccharomyces cerevisiae
atggctttccaaaaggatgctaaatcttctgcctactcctccagatttcaaactccattcagaagaagaagagaaggtaagactgactactaccaaagaaagagattggtcactcaacacaaggctaagtacaacaccccaaagtaccgtttggttgtcagattcaccaacaaggacatcatctgtcaaatcatttcttccaccattaccggtgatgttgttttggccgccgcttactctcatgaattgccaagatacggtattactcacggtttgaccaactgggctgctgcttacgctactggtctattgattgccagacgtactttgcaaaaattgggtttggacgaaacttacaagggtgtcgaagaagttgaaggtgaatacgaattgactgaagctgttgaagatggtccaagaccatttaaggtcttcttggatatcggtttacaaagaactaccactggtgctagagttttcggtgctttgaagggcgcttctgacggtggtttgtacgttccacactctgaaaacagattcccaggttgggatttcgaaaccgaagaaattgatccagaattgttgagatcttacatttttggtggtcacgtttctcaatacatggaagaattagctgatgacgatgaagaacgtttctctgagttgttcaagggttacttggctgatgatattgacgctgactctttggaagacatttacacttctgctcacgaagccatcagagccgacccagctttcaagccaactgaaaagaagttcactaaggaacaatatgctgctgaatccaagaaatacagacaaaccaagttgtctaaggaggaaagagctgctcgtgttgctgccaagattgctgccttggctggtcaacaataa

SEQ ID NO: 4570 - DNA, 324 bp, Artificial Sequence
  Optimized genes for Saccharomyces cerevisiae
atggctgaatctcacagattgtacgttaagggtaagcacttgtcttaccaaagatctaagagagttaacaacccaaacgtttctttgatcaagattgaaggtgttgctactccacaagatgctcaattctacttgggtaaaagaattgcttacgtctacagagcttccaaggaagttagaggttctaagatcagagtcatgtggggtaaggttaccagaactcacggtaactctggtgtcgttcgtgctaccttcagaaacaacttgccagctaagactttcggtgcttctgtcagaatcttcttgtacccatctaacatttaa

SEQ ID NO: 4571 - DNA, 1218 bp, Artificial Sequence
  Optimized genes for Saccharomyces cerevisiae
atgttctctttgaaggctttattgccattggctttgttgttggtttctgctaaccaagttgctgctaaggtccacaaggctaagatctacaagcacgaattgtccgatgaaatgaaggaagttactttcgaacaacacttagctcacttgggccaaaagtacttaactcaatttgaaaaagctaacccagaagtcgttttctccagagaacacccattcttcactgaaggtggtcacgatgttccattgaccaactacttgaacgctcaatactacactgacattactttaggtactccaccacaaaacttcaaggttatcttggatactggttcttccaacttatgggttccatctaacgaatgtggttccttggcttgtttcttgcactctaagtacgatcatgaagcttcctcttcttacaaagccaacggtactgaattcgctatccaatacggtacaggttcattggaaggttacatctctcaagatacattgtctattggtgatttaaccatcccaaagcaagactttgctgaagccacttctgaaccaggtttgacttttgccttcggtaagtttgatggtattttgggtctaggttatgatactatttctgttgacaaggttgttcctccattttacaatgctattcaacaagatttgttagatgaaaagagattcgctttctacttgggtgacacttccaaggacaccgaaaacggtggtgaagctacctttggtggtattgacgaatccaaattcaaaggtgacatcacctggttaccagtcagaagaaaggcttactgggaagtcaagttcgaaggtatcggtcttggtgacgaatacgctgaattagaatctcacggtgctgccatcgataccggtacctctttgatcactttgccttctggtttggccgaaatgatcaacgctgaaattggtgccaagaagggttggactggtcaatatactttggactgtaacaccagagacaacttgccagatttgattttcaactttaatggttacaacttcaccattggcccatacgactacaccttggaagtttccggttcttgtatctccgctattaccccaatggacttcccagagccagttggtccattagccattgttggtgatgcttttttgagaaaatactattctatctatgacttgggtaacaacgccgtcggtttagccaaggccatttaa

SEQ ID NO: 4572 - DNA, 654 bp, Artificial Sequence
  Optimized genes for Saccharomyces cerevisiae
atgagtaagatcacttcttctcaagttagagaacacgttaaggaattattaaagtactctaacgaaaccaagaagagaaactttttggaaactgtcgaattgcaagtcggtttgaagaactacgatccacaaagagacaagagattctctggttccttgaaattgccaaactgtccaagaccaaatatgtctatctgtatcttcggtgacgctttcgatgttgacagagctaagtcttgtggtgttgatgctatgtccgtcgatgacttgaagaagttgaacaagaacaaaaagttgattaagaagttgtctaagaaatacaacgcttttattgcttctgaagttttgatcaagcaagttccaagattattgggtcctcaattatccaaggctggtaaattcccaactccagtttcccacaacgatgatttgtacggtaaggttactgacgtcagatctactatcaagttccaattgaagaaggtcttgtgtttggctgttgctgtcggtaacgttgaaatggaagaagatgtcttggttaaccaaatcttgatgtctgtcaacttcttcgtttctttgttgaaaaaaaactggcaaaacgttggttctttagttgtcaagtcctccatgggtccagctttcagattgtactaa

SEQ ID NO: 4573 - DNA, 1113 bp, Artificial Sequence
  Optimized genes for Saccharomyces cerevisiae
atggccgaagcctctattgaaaagactcaaatcttgcaaaagtatttggaattggatcaaagaggtcgtattattgctgaatatgtctggattgatggtaccggtaacttgagatctaagggtagaactttgaagaagagaatcacttccatcgaccaattgccagaatggaacttcgacggttcctctactaaccaagctccaggtcacgactctgatatctacttaaaaccagttgcttactacccagatccattcagacgtggtgataatattgttgttttggctgcctgttacaacaacgatggtactccaaacaagttcaaccacagacatgaagctgctaagttgtttgctgcacacaaggatgaagaaatctggttcggtttagaacaagaatacactttattcgatatgtacgatgatgtttacggttggccaaagggtggttatccagccccacaaggtccttattactgtggtgttggtgccggtaaggtctacgccagagacatgattgaagctcactacagagcttgtttgtacgctggtttggaaatttctggtatcaacgctgaagttatgccatctcaatgggaattccaagtcggtccatgtaccggtattgatatgggtgaccaattatggatggctagatactttttgcacagagttgcagaagaatttggtatcaagatctctttccatccaaagccattgaaaggtgactggaacggtgctggttgtcacaccaacgtttctaccaaggaaatgagacaaccaggtggtatgaagtacattgagcaagccatcgaaaaattgtccaagcgtcacgctgaacacattaagttatatggttctgacaacgacatgagattgactggtagacacgaaactgcttctatgaccgctttctcttccggtgtcgctaacagaggttcttctatcagaattccaagatccgttgccaaggaaggttacggttacttcgaagacagaagaccagcttccaacattgacccatacttggttactggtatcatgtgtgaaaccgtttgtggtgctattgacaatgctgacatgactaaggagtttgaaagagaatcttcatga

SEQ ID NO: 4574 - DNA, 279 bp, Artificial Sequence; identical to SEQ ID NO: 4445
  Optimized genes for Saccharomyces cerevisiae

SEQ ID NO: 4575 - DNA, 1377 bp, Artificial Sequence
  Optimized genes for Saccharomyces cerevisiae
atgggtaaggaaaaatctcacatcaacgtcgttgtcatcggccacgttgactccggcaagtccactactacaggtcatttgatttacaagtgtggtggtattgacaagagaaccattgaaaagttcgaaaaagaagctgctgaattgggtaaaggttctttcaagtacgcttgggttttggacaagttgaaggctgaacgtgaaagaggtatcactatcgatattgccttatggaagtttgaaactccaaaataccaagtcactgttattgatgctcctggtcacagagatttcattaaaaatatgattaccggtacttctcaagctgactgtgctattttgatcatcgctggtggtgttggtgaattcgaggctggtatttccaaggatggtcaaaccagagaacacgctttattggctttcactttgggtgtcagacaattaattgttgctgtcaacaagatggactctgtcaaatgggatgaatctagattccaagaaattgtcaaggagacctctaacttcatcaagaaggtcggttacaacccaaagactgtcccattcgtcccaatttctggttggaacggtgacaacatgatcgaagctactaccaacgctccatggtacaaaggctgggaaaaggaaaccaaggctggtgtcgtcaagggtaagaccttgttggaggccattgacgctatcgagcaaccatccagaccaactgacaaaccattgagattgccattgcaagatgtttacaagattggtggtatcggtaccgtcccagtcggtagagttgaaactggtgttatcaagccaggtatggttgttacttttgctccagctggcgttaccactgaagttaaatccgtcgaaatgcaccacgaacaattggaacaaggtgttccaggtgataatgttggtttcaacgttaagaacgtttccgttaaggaaatcagacgtggtaacgtttgtggtgatgccaagaacgacccaccaaagggttgtgcctccttcaatgctaccgttatcgtcttgaaccacccaggccaaatctctgccggttactctccagttttggattgtcacactgctcacattgcttgtcgtttcgacgaattattagaaaagaatgacagaagatctggtaagaaattggaagatcatccaaaattcttgaaatccggtgacgcagctttggtcaagttcgttccatctaagccaatgtgtgttgaagccttctctgaatacccacctttaggtagattcgctgttagagacatgagacaaactgttgccgttggtgtcattaagtctgttgataaaaccgaaaaagctgctaaggttactaaggccgctcaaaaggctgccaaaaaataa

SEQ ID NO: 4576 - DNA, 525 bp, Artificial Sequence
  Optimized genes for Saccharomyces cerevisiae
atgtctgctaaggctcaaaacccaatgagagacttgaagattgaaaagttggtcttgaacatttctgttggtgaatctggtgacagattgaccagagcttccaaggttttagaacaattatccggtcaaactccagttcaatctaaggccagatacactgttagaactttcggtatcagaagaaacgaaaaaattgctgttcacgttaccgtcagaggtccaaaggctgaagaaattttggaaagaggtttgaaggtcaaggaataccaattgagagatagaaacttctccgctactggtaactttggtttcggtattgacgaacacattgatttgggtatcaagtatgacccatctattggtattttcggtatggacttctacgttgttatgaacagaccaggtgctagagttactagaagaaagagatgtaagggtactgtcggtaactcccacaagactaccaaggaagacaccgtttcttggttcaagcaaaagtacgatgctgatgttttggacaaataa

SEQ ID NO: 4577 - DNA, 864 bp, Artificial Sequence
  Optimized genes for Saccharomyces cerevisiae
atgcaagctattgctgattctttctccgtcccaaacagattggtcaaggaattgcaatatgacaacgaacaaaacttggaatctgatttcgttactggtgcttcccaattccaaagattagctccatctttgaccgttccaccaattgcctctccacaacaatttttgcgtgctcacactgatgactccagaaaccctgactgtaagatcaagatcgctcatggtactaccactttggctttcagattccaaggtggtattattgttgctgttgattctagagctactgctggtaactgggttgcttctcaaactgttaagaaggttattgaaatcaacccattcttgttgggtacaatggctggtggtgctgctgactgtcaattctgggaaacctggttaggttctcaatgtcgtttgcacgaattgagagaaaaggaaagaatttctgtcgctgccgcctccaagattttgtccaacttggtttaccaatacaagggtgccggtttgtccatgggtaccatgatctgtggttacaccagaaaggaaggtccaaccatttactacgttgactctgacggtactagattgaagggtgacattttctgtgttggttctggtcaaacctttgcctacggtgttttggactctaactacaaatgggatttgtctgttgaagacgctttgtacttgggtaagagatctatcttggccgctgctcacagagatgcttactccggtggttccgttaacttataccatgtcactgaagatggttggatctaccacggtaaccacgatgtcggtgaattattctggaaggtcaaagaagaagaaggttcattcaacaacgtcattggttag

SEQ ID NO: 4578 - DNA, 438 bp, Artificial Sequence
  Optimized genes for Saccharomyces cerevisiae
atgggtaaaggtaaaccaagaggtttgaactccgctagaaaattgagagtccacagaagaaacaacagatgggctgaaaacaactacaagaagagattgttaggtaccgctttcaagtcttctccatttggtggttcttcccacgccaagggtatcgtcttggaaaagttgggtattgaatccaagcaaccaaattctgctatcagaaagtgtgtcagagttcaattgatcaagaacggtaagaaggtcactgcttttgttccaaacgatggttgtttgaacttcgttgacgaaaatgatgaagttttgttggctggtttcggtagaaagggtaaggctaagggtgacattccaggtgttagattcaaagttgtcaaggtttctggtgtctctttgttggccttatggaaggaaaaaaaagaaaagccaagatcataa

SEQ ID NO: 4579 - DNA, 522 bp, Artificial Sequence
  Optimized genes for Saccharomyces cerevisiae
atgttggctttggctgacaacattttgagaatcatcaacttcttgtttttggttatctctattggtttgatttcctctttgttgaacacccaacacagacactcctccagagttaactactgtatgttcgcttgtgcttacggtattttcactgactctttatatggtgtttttgctaacttcattgaaccattagcttggccattggtcttgttcaccttggatttcttaaactttgtctttactttcactgctggtactgttttggctgtcggtatcagagctcactcttgtaacaactcttcttacgttgactccaacaagatcactcaaggttccggtaccagatgtagacaagctcaagctgctgttgctttcttgtacttctcctgtgccatttttttggccaagactttgatgtctgttttcaacatgatttctaacggtgctttcggttctggttctttctctaagagaagaagaactggtcaagttggtgtcccaaccatttctcaagtgtaa

SEQ ID NO: 4580 - DNA, 630 bp, Artificial Sequence
  Optimized genes for Saccharomyces cerevisiae
atgtctcaacaagttggtaactccatcagaagaaagttggttattgttggtgacggtgcttgtggtaaaacttgtttgttgattgtcttctccaagggtcaattcccagaagtctacgttccaactgttttcgaaaactacgtcgctgatgtcgaagttgatggtagaagagttgaattggctttgtgggacactgctggtcaagaagactacgacagattgagaccattgtcttacccagactctaacgttgttttgatctgtttctctattgacttgccagattctttggaaaatgttcaagaaaaatggattgctgaagtcttgcacttctgtcaaggtgtcccaattattttggtcggttgtaaggtcgatttgagaaacgacccacaaaccattgaacaattgagacaagagggccaacaaccagttacttcccaagaaggtcaatctgttgctgaccaaattggtgccaccggttactacgaatgttctgccaagactggttacggtgttagagaagtttttgaagctgctaccagagcttccttgatgggtaagtctaagaccaacggtaaggctaagaagaacaccactgaaaagaagaaaaagaagtgtgttttattataa

SEQ ID NO: 4581 - DNA, 3099 bp, Artificial Sequence
  Optimized genes for Saccharomyces cerevisiae
atggccgatactccatctgttgccgttcaagccccaccaggttacggtaaaactgagttattccatttgccattgattgctttggcctctaaaggtgatgtcaaatacgtctctttcctattcgtcccatacactgtcttgttagccaactgtatgatcagattgggtcgttgtggctgtttgaacgtcgctccagtaagaaacttcatcgaagaaggttgtgatggtgttaccgacttgtatgttggtatctacgatgacttggcttcaaccaacttcactgacagaattgccgcttgggagaacattgttgaatgtaccttcagaactaacaacgttaagttaggttatttgattgtcgacgaattccacaactttgaaactgaagtttaccgtcaatctcaatttggtggtatcactaacttggatttcgatgcttttgaaaaagctatcttcttgtctggtactgctccagaagctgttgctgacgctgccctacaaagaatcggtttgactggtctggccaagaagtctatggacatcaatgaactaaagagatctgaagatttgagtagaggtttatcttcttacccaactagaatgttcaacttgatcaaagaaaagtccgaagtccctttgggtcacgttcacaagatctggaagaaggtcgagtcccaaccagaggaagctttaaagttgttgcttgctttgttcgaaattgaaccagaatctaaggctattgttgttgccagcactaccaacgaagttgaagaattggcttgttcctggagaaagtactttagagttgtctggattcacggtaagctaggtgctgctgaaaaggtttctcgtaccaaagaatttgtcactgacggttccatgagagtcttaattggtaccaagttggttactgaaggtattgatatcaagcaattgatgatggttatcatgttagataacagattgaacatcatcgagttgattcaaggtgtcggtagattaagagacggtggtttatgttacttgctatctagaaagaactcttgggctgctagaaatagaaagggtgaattacctccaattaaggaaggttgtattaccgaacaagtcagagaattctacggcctagaatccaagaaaggtaagaagggccaacatgttggatgttgtggtagcagaaccgatttatccgctgataccgtggaattgatcgaacgtatggatagactagccgaaaaacaagctaccgcttccatgtctatcgttgctttgccatcctccttccaagaatctaattcttccgacagatgtagaaagtactgttcttctgatgaagattctaacacttgtatccatggtagtgctaacgctagcaccaatgccacaactaactcttctaccaacgctactaccactgcctccaccaatgttagaacctctgccactactacggcttctattaatgttcgtacttccgctaccactactgaatccactaactcttccactaatgctactactaccgcctccacaaacgttagaacttctgctaccacaacagcttctatcaacgtcaggacctccgccaccaccactgaatctaccaactccaatacttcagctacaaccactgaatcaacagactctaacacctctgctactactacagaaagtacaaacagcagtaccaacgccactaccaccgcttccatcaacgtcagaacttccgcaaccactacagagtcgaccaacagtaacaccaacgcaactactactgaatccaccaactcctctactaatgctactaccactgaaggaaccaactccaacacttctgccaccaccactgcttctacaaattcatctactaatgctaccaccaccgaatctactaatgcatctgctaaggaggatgccaataaggatggtaacgctgaagacaacagatttcatccagttactgatattaacaaggaatcgtacaagcgtaagggttctcaaatggtcttgttggaaagaaaaaaattgaaggctcaattcccaaacactagtgaaaacatgaacgttttgcaattcttgggtttccgttctgacgaaatcaagcacttgtttttgtacggtattgacgtctacttctgtccagaaggtgttttcacccaatatggtttgtgtaagggttgtcaaaagatgtttgagctatgtgtttgttgggccggtcaaaaggtctcctacagaagaatggcttgggaagccttggctgtcgaaagaatgctaagaaacgatgaagaatataaggaatacttagaagacattgaaccttaccacggtgacccagtcggttacttgaagtatttctctgtcaagagaggtgaaatttactctcagatccaaagaaactacgcttggtacttggccattactcgtagaagagaaaccatttccgttttggactctacccgtggtaagcaaggttctcaagtttttagaatgtccggtagacaaatcaaggaattgtactacaaagtttggtctaatttgagagagagcaagaccgaagtgttacaatacttcttaaactgggatgagaagaagtgtcgtgaagaatgggaagcaaaggacgacactgttttcgttgaagctttggaaaaggttggtgtcttccaacgtttgagatcaatgacttctgctggtttgcaaggtccacaatacgttaaattacagttctccagacaccacagacaattgagatccagatacgaattgtctttgggtatgcacttgcgtgaccaattagcattaggtgtgactccttccaaggttccacactggactgctttcttgtccatgttgattggtctattttgtaacaagactttcagacaaaaattggaatacctattggaacaaatttctgaagtctggttattgcctcattggttggatttggctaatgtcgaagttttagctgcagacaataccagagtgccattatacatgttgatggttgccgtccacaaggaattagactccgatgatgttccagatggcagattcgacattttgttgtgtagagattcctcaagagaagttggtgaataa

SEQ ID NO: 4582 - DNA, 621 bp, Artificial Sequence
  Optimized genes for Saccharomyces cerevisiae
atggcttccactgatttctctaagatcgaaaccttgaagcaattaaatgcctctttagctgataagtcctatattgaaggtaccgctgtctcgcaagctgatgtcactgttttcaaggcgtttcaatctgcttacccagagttctctagatggttcaaccacatcgcttctaaggctgacgagttcgattcttttccagctgctagtgccgccgctgctgaagaagaagaagatgacgacgttgatctatttggttcagacgatgaagaggctgacgcagaagcagaaaagcttaaagccgaaagaatcgccgcctacaacgctaaaaaggctgccaagcctgccaagccagcagctaagagcatcgtcaccttggatgttaaaccatgggatgacgaaactaacctggaagaaatggttgctaatgttaaggctattgagatggaaggtttgacttggggtgctcatcaatttataccaattggtttcggcatcaagaaattgcaaattaactgtgtagttgaagacgacaaggtctctttggacgatttgcaacaatccattgaagaagatgaagaccacgtgcagtccacagacattgctgccatgcaaaaattgtaa

SEQ ID NO: 4583 - DNA, 1929 bp, Artificial Sequence
  Optimized genes for Saccharomyces cerevisiae
atgtccaaggcagtcggtatcgacttgggtactacttacagttgtgttgcacactttgccaatgacagagttgacattatcgcgaacgaccaaggtaaccgtaccacaccatcatttgtcgctttcaccgacactgaaaggttgattggcgatgctgccaagaatcaagccgctatgaacccatcgaacactgtattcgacgctaagaggttaatcggtagaaactttaacgacccagaagtccaagccgacatgaagcacttcccatttaagctgatcgacgtggacggaaaaccccaaattcaagttgaattcaagggtgaaactaagaacttcaccccagaacaaatttcttccatggtcttgggtaaaatgaaggaaaccgctgaatcttatttgggtgctaaggttaacgatgctgttgttactgtcccagcgtacttcaatgattctcaaagacaagctaccaaggatgctggtactattgctggtttgaacgttttaagaattatcaatgaaccaactgcagctgctatcgcttacggcttggacaagaaagggaaggaggaacacgttttgatttttgatctgggtggtggtacttttgacgtttccttactttccatcgaggatggtatttttgaagtaaaggccactgctggtgatactcatttgggtggcgaagatttcgataacagattggttaaccattttatccaggaattcaaaagaaaaaataaaaaggatttgtctactaaccaaagagctttgagaagattgagaacggcctgtgaaagagcaaagagaactttgtcttcttccgctcaaacgtctgttgaaatcgactccttattcgagggtattgatttctatacctcaattactagagcacgtttcgaagaattatgcgctgatttgtttcgttctactttggacccggttgaaaaagtcctaagagatgctaaactagataagtctcaagtggatgaaatcgtccttgtcggtggtagcactagaattccaaaggtccaaaagctcgtcaccgattacttcaacggtaaagaaccaaacagaagcattaatccagacgaagctgtcgcctacggggctgccgtgcaagcagccattttgacaggcgacgaatcttctaaaacccaagacttgttgttgttagatgttgctcctttatctttgggtatcgaaaccgctggtggtgtaatgacaaagttgatcccaagaaattcgacaatcccaacaaaaaagtccgaaattttctccacctatgctgacaaccaacctggtgttttaatccaggttttcgaaggtgagagagctaagactaaggataacaacttgctaggtaaatttgaattgagcggtatcccacctgctccacgtggtgttccacaaattgaagtgactttcgacgtcgatagtaacggtatcttaaatgtttccgccgtcgaaaagggtaccggtaagtctaacaagattactattaccaatgacaaaggtagattgtctaaggaagacattgaaaagatggttgccgaagctgaaaagttcaaggaggaagatgaaaaggaatctcaacgtatcgcttccaagaatcaacttgaatctattgcttactctttgaagaacaccatatcagaggctggtgacaaattagaacaagctgataaggacaccgttaccaagaaggctgaagagaccattagttggctagattctaacactacagcttcaaaggaagaattcgatgataagttgaaagagttgcaggatatagctaacccaattatgtccaagctataccaagccggaggtgccccaggtggtgctgccggtggagctcctggtggtttcccaggtggtgctcccccagccccagaagccgaaggccctactgttgaagaagtcgactaa

SEQ ID NO: 4584 - DNA, 1503 bp, Artificial Sequence
  Optimized genes for Saccharomyces cerevisiae
atgtctagattggagagattgacctccttgaacgttgttgctggtagcgatctaaggcgtacatctattattggtactattggaccaaagactaacaaccctgaaaccttagtcgcactgagaaaggccggtctaaatatcgtcagaatgaacttctcacatggtagttatgagtaccacaaatctgttattgataacgccagaaagtccgaagaattatatccagggagaccattggccatcgctttggataccaagggtccagaaataagaactggtacaacaaccaatgacgtcgactacccaatccctccaaaccacgaaatgatcttcaccaccgacgacaagtatgctaaggcttgtgacgataaaattatgtacgtcgactacaaaaacattactaaggtaatctctgcaggtagaataatctacgtcgatgacggtgttttgtcattccaagtcttggaagttgttgacgataagactttgaaggttaaggctttaaacgctggtaaaatctgtagtcataaaggtgttaacttgcccggtaccgatgtcgacttgccagccctgtctgaaaaggacaaggaggatttgagatttggtgttaaaaatggtgtccatatggttttcgcctccttcattcgtacagcgaatgacgttttgactatccgtgaagttcttggtgaacaaggtaaggacgttaagatcatcgttaagattgaaaaccaacaaggtgttaataactttgatgaaattctaaaggttacggacggtgttatggttgctcgtggtgatcttggtattgaaattcctgctccagaagtgttggctgtgcaaaagaaattgattgccaagtctaacttagctggtaaaccagttatttgcgctacacagatgttagaatcaatgacttacaatcctagaccaactagagccgaggtttccgatgtaggtaacgctatcttagacggtgccgattgtgtcatgctatccggtgaaactgctaagggtaactatccaattaacgccgttactactatggctgaaaccgctgtcatcgctgaacaagctatcgcatacttgccaaactatgatgacatgagaaactgtacccctaaaccaacttccactactgaaaccgtcgcagcttctgccgtcgccgctgtgttcgagcaaaaggctaaggccatcattgttttgtccacgtctggtactaccccaagattggtttctaaataccgtccaaattgcccgattatcttggtcaccagatgtccaagggctgctagattctctcacctctacagaggcgtctttccatttgtgtttgaaaaggaaccagtatcggactggactgatgatgttgaagctagaattaatttcggcattgaaaaggctaaggaattcggaatcttaaagaagggtgatacctacgtcagcattcaaggtttcaaagctggtgcaggccactctaacactttgcaagtctccactgtttaa

SEQ ID NO: 4585 - DNA, 513 bp, Artificial Sequence
  Optimized genes for Saccharomyces cerevisiae
atgctaagaactactagattgtggaccacaagaatgccaaccgtttccaagttgttccttagaaacagttctggtaatgccttgaacaagaacaaattgccattcttgtacagctcacaaggtccacaagctgttcgttatacttcccaacacgagtggatcgccgttcaccaggacaagacggcttttgtcggtattactaaatacgccaccgacgctttgggtgacgctacttacgttgaattaccagaagttggaaccgaaattgcacaaggtgaatccttgggttctatcgaatcggtgaagtctgcttctgaaatctatcaaccagctgatggtaccgttgaagaaattaatacaaacttggaggaaaatccaggcgtcgttaacgaagatcctatgggtgatggttggctagtcaagatgaaattgggtgaaggggtcaacgtagaacaagtcgagggtttaatgtctctggaacaatacgaaaagactttagttcatgacgattaa

SEQ ID NO: 4586 - DNA, 399 bp, Artificial Sequence
  Optimized genes for Saccharomyces cerevisiae
atgagtggtggcaagggtggtaaagccgggtctgctgctaaggcctcccaaagcagatctgccaaggctggtctgaccttcccagtcggtagagttcacagattgctaagaagaggtaactacgctcaaaggatcggatctggtgcgcctgtttatttgacagctgttctagaatacttggctgctgaaattttggaattagccggtaacgctgcacgtgacaataagaagactagaatcattccacgtcatttacaacttgctattagaaacgatgatgaattgaacaaattattgggtaacgtcaccattgcacagggtggtgtgttgccaaatatccaccaaaacttgttgccaaagaaatcagctaagactgctaaggcctcccaagagttgtaa

SEQ ID NO: 4587 - DNA, 570 bp, Artificial Sequence
  Optimized genes for Saccharomyces cerevisiae
atggccaacttgcgtactcaaaagagactagccgctagtgttgtcggtgtcggaaagagaaaagtctggttagatccaaacgagacctccgaaattgctcaagctaactctagaaatgccatcagaaagttagtgaaaaacggtaccattgtaaaaaaggctgttactgttcactctaagtctagaacaagagcgcacgcccaatctaagagagaaggtagacattccggctacggtaagaggaagggtactagagaagccagacttccatcccaagtcgtttggattagaagattgagagttttgcgcagattgttggcaaagtacagagatgctggtaaaatcgacaagcatttgtaccacgttctgtataaggaaagcaagggtaacgctttcaaacataagagagctttggttgaacacatcattcaagctaaggctgacgctcagcgtgaaaaggcactaaatgaagaagccgaagcaagaagattaaaaaacagagccgctcgtgaccgtagggctcaacgtgtcgctgaaaaaagagatgctttgttgaaggaggatgcttaa

SEQ ID NO: 4588 - DNA, 603 bp, Artificial Sequence
  Optimized genes for Saccharomyces cerevisiae
atgggtatctctagagattccagacacaaaagaagcgctaccggtgccaagagagcacaattcagaaagaagagaaagttcgaattaggtagacaaccagctaacacaaaaattggcgctaagagaatccattctgttagaacgagaggtggtaacaagaaatatagagctttgagaatcgaaactggaaacttcagttgggcttctgaaggtatttctaagaagactagaattgctggtgttgtataccatccatcaaacaatgaactagtgagaaccaacactttgactaaggctgctattgttcaaatcgatgccactccattcagacaatggttcgaggcccactacggtcagactcttggtaaaaagaagaacgttaaggaagaagaaaccgtcgccaaatcgaagaatgcggaaagaaagtgggctgctcgtgctgcttcagcaaagatcgaatcttccgtcgaatcccaattttctgccgggaggttatacgcctgtatttcctcccgtcctggtcaatctggcagatgtgacggttacattctggagggtgaagaattggctttttatttgcgtcgtttgaccgctaagaaataa

SEQ ID NO: 4589 - DNA, 414 bp, Artificial Sequence
  Optimized genes for Saccharomyces cerevisiae
atgagtggtaacggtgcccaaggcactaaattcagaatctctcttggattacctgttggggcgattatgaactgtgctgacaactccggtgctagaaacttgtacatcattgctgtcaagggttctggttctcgtctgaatcgtttgccagcagcctccttgggtgatatggtaatggctaccgtcaagaaaggtaagccagaattgaggaagaaggtcatgccagctattgttgttagacaagctaagtcatggagaagaagagatggtgtctttctatatttcgaagataacgcaggtgttatcgccaatccaaagggcgagatgaagggtagcgctattactggtccagttggtaaagaatgtgctgacttgtggccaagagtcgcctccaactctggtgttgtggtttaa

SEQ ID NO: 4590 - DNA, 393 bp, Artificial Sequence
  Optimized genes for Saccharomyces cerevisiae
atggcttctctaccacacccaaagatcgtaaaaaagcacaccaaaaaattcaagaggcatcactctgacagataccacagagttgctgaaaactggagaaagcaaaagggtattgattctgtcgttcgtagacgttttagaggcaacatctcacaaccaaagattggttacggttccaacaaaaagactaagttcttgagtcctagcggtcacaagactttccttgtggccaacgtcaaggatctggagacattgaccatgcatactaagacctatgctgctgaaattgctcataacatttccgctaagaatagagttgttatcttagccagagcaaaggctttaggtattaaggtcactaatccaaaaggtagattggccttggaagcttaa

SEQ ID NO: 4591 - DNA, 411 bp, Artificial Sequence
  Optimized genes for Saccharomyces cerevisiae
atggccagaaccaaacaaactgctagaaagtcaactggtggtaaggccccaaggaagcaattggcttctaaggctgctagaaagagtgccccatctaccggcggtgttaaaaagcctcatagatacaagccaggtacagtcgctttgagagaaatcagaagatttcagaaaagcaccgaattgttgattagaaagttgccattccaaagacttgtccgtgagatcgctcaagacttcaagactgacttaagattccaatcctctgctatcggtgcattacaagaatccgttgaagcttatttggtttccctgtttgaagatactaacctagccgctattcacgcgaagcgtgtgactattcaaaaaaaagatattaagttggcaagaagattaagaggtgaacgttcttaa

SEQ ID NO: 4592 - DNA, 864 bp, Artificial Sequence
  Optimized genes for Saccharomyces cerevisiae
atgacttatacgactcgtcaaattggtgctaagaacactctagaatacaaagtttacatcgaaaaggacggaaagccagtgagcgcttttcacgacatcccattgtacgccgacaaagaaaacaacatcttcaacatggttgtcgaaatcccaagatggacaaacgctaaattagaaattactaaggaagaaactttaaaccctatcattcaagataccaagaaaggtaagttaagattcgtcagaaattgttttccccatcacggttacattcacaattatggtgcatttccacagacctgggaagatccaaacgtttcccatccggaaaccaaggcggtcggtgacaacgatccaattgacgttttggaaatcggcgaaaccattgcttatactggtcaagtcaagcaagttaaggctttgggtattatggctttgttggatgagggtgagactgactggaaagttattgctatagacattaacgatcctttggccccaaagttgaatgatatcgaagatgtagaaaagtacttcccaggtttgctgagagctacaaacgagtggttcagaatctacaaaatccctgatgggaaaccagaaaatcaattcgccttcagtggtgaagctaagaataagaagtacgctttggatattattaaggaaactcatgattcctggaagcaattgatcgctggtaagtcttccgattccaaaggcatcgaccttaccaacgttactctacctgacaccccaacctactctaaggccgcttcagatgccattccaccagcatctccaaaggctgacgccccaattgacaagtctatcgacaagtggttctttatttctggttctgtctaa

SEQ ID NO: 4593 - DNA, 936 bp, Artificial Sequence
  Optimized genes for Saccharomyces cerevisiae
atgttgagcagaattgtttccaataacgctaccagatccgtcatgtgtcatcaagctcaagtcggaatcttgtacaagactaacccagtcagaacctacgctactttgaaggaagttgaaatgcgtttaaagtccatcaaaaatatcgaaaagattactaaaactatgaagatcgtagcttcaactcgtttatctaaggccgaaaaagctaagatctctgctaagaagatggacgaagctgaacaattgttctacaaaaatgctgaaaccaagaacttagacgttgaggcgacggagaccggtgctccaaaggaattgattgtcgctattacttccgataagggtttgtgtggttctatccactctcaattggctaaggctgtgagaaggcatctcaacgatcagcccaacgctgatattgttactatcggtgacaagattaaaatgcaattattgagaacccacccaaacaacatcaaattgagcattaacggtattggtaaggatgctccaacattccaagaatctgcattgattgctgataagttgctgtctgtcatgaaggccggtacctatccaaagatttcaatcttctataacgatcctgttagttcgctatctttcgaaccatccgaaaagccaatttttaacgcaaaaacaatcgaacaatctccaagtttcggtaagtttgaaatagacaccgatgccaacgttcctagagacctttttgaatatactttggccaatcaaatgctaactgctatggcccaaggttacgccgctgaaatttctgccagaagaaacgcaatggataacgcctccaaaaatgctggtgacatgatcaacagatactctattttgtacaacagaactcgtcaagccgttattaccaatgagttggttgacattatcacaggtgcttcctctttaggctaa

SEQ ID NO: 4594 - DNA, 471 bp, Artificial Sequence
  Optimized genes for Saccharomyces cerevisiae
atgagcaccgagttaaccgtccaatctgaaagagcctttcaaaagcagccacacattttcaacaatccaaaggttaaaacctccaagagaactaaaagatggtacaagaacgctggtttgggattcaaaactcctaaaacagccatcgaaggttcttacatcgataaaaagtgtccattcactggtttggtatcaatcagaggtaagattttgaccggtactgttgtctctaccaagatgcatagaactattgttatcagaagagcttacctacactacattcctaagtataatcgttatgaaaagcgtcacaaaaacgttccagtgcatgtctctccagcttttagggttcaagtcggtgacattgttacagttggccaatgtagaccaatttccaagactgtcagattcaacgttgtgaaggtctccgctgccgcaggtaaggctaacaagcaatttgctaagttctaa

SEQ ID NO: 4595 - DNA, 633 bp, Artificial Sequence
  Optimized genes for Saccharomyces cerevisiae
atgtccgtttctaagatcgccttcgttttaagtgcgattgcttctttggctgttgctgatacttctgccgctgaaactgctgagctacaagccatcatcggtgatatcaattctcacctatcggactatttaggtttggaaacgggtaactctggtttccaaattccatccgatgttttgtctgtttaccaacaggtcatgacctatactgacgacgcttacaccaccttgttttccgaattggatttcgacgccattacaaagacaattgttaagcttccatggtacaccactagattgtcctcagaaattgctgcagctttagcttccgtttctccagcttcttctgaagccgcttcttcttccgaagccgcttcctcctcaaaagctgcttccagcagtgaagctacttcttccgcagctccatcttcttctgcagccccttcctcatctgctgctccatccagttcggctgaatctagcagtaaggctgtttcctcatctgtcgccccaactacttcctctgtctctacttcaaccgtagagaccgcctctaacgccggccaaagagtcaacgccggtgctgctagctttggtgctgtcgtggctggtgctgctgcattgctgttgtaa

SEQ ID NO: 4596 - DNA, 1290 bp, Artificial Sequence
  Optimized genes for Saccharomyces cerevisiae
atgcaattcaagaatgctttgaccgctactgctatcttgagcgctagcgctttagctgcaaactctactacctccattccatcttcttgttctattggtactagcgctactgctactgctcaggctgacttggataaaatttctggttgctctacgatcgtcggtaacctaaccattactggtgatttaggaagtgctgctttggcttccatccaagaaattgatggttctttgactatttttaactcgtcctctttgagttccttctcagccgattctattaagaagatcacaggtgacttaaacatgcaagaacttataatcttgacctcagcgagtttcggttctctgcaagaggtcgattccatcaatatggttaccttgccagctatttctactttctccactgacttacaaaacgcaaacaacatcattgtttctgacaccaccttggaatcagttgaaggtttttctactctcaaaaaggttaacgtcttcaatatcaacaacaatcgttacttgaactctttccaatcctccttggaatcagtctctgattccttgcaattctcctctaatggtgataacacaactctagctttcgataacctagtttgggctaataatattactttaagagacgtcaactctatctcatttggttcgttgcaaacagtgaacgcctctttaggttttatcaataacaccttgccttctcttaacttgacgcaattgtctaaagttggtcaatcattgagtatcgttagcaatgacgaattaagcaaggctgccttttcgaacttgaccactgttggcggtggtttcattattgcaaacaatactcaattgaaggttatcgacggttttaacaaggtccaaaccgtcggaggtgctattgaagttaccggtaacttttctacattggacttgtctagcttgaagtctgtgagaggtggcgccaacttcgactcttccagttctaacttctcctgtaacgccttaaagaagttgcagtccaacggcgctattcaaggtgattctttcgtttgtaagaacggtgctacttctacctctgttaaactgtcctccacctctactgaatcaagtaagtcttccgccacttcgtctgctagttcctccggtgatgcttcaaatgctcaagctaacgtctctgcctccgcctcctcttcttcctcctcttccaaaaagtccaagggtgcagccccagagttggtcccagctacatctttcatgggggtagttgccgccgtaggtgttgctctactttaa

SEQ ID NO: 4597 - DNA, 447 bp, Artificial Sequence
  Optimized genes for Saccharomyces cerevisiae
atgtcttcttccaagagaatagccaaagaattgtctgaccttgaaagagatcctccaacttcttgctccgccggcccagttggtgacgatttgtaccactggcaagcttcgattatgggtccagctgatagtccatacgcaggtggtgttttttttttatccatccatttcccaactgactaccccttcaagccaccaaagatctctttcaccactaagatttatcatcctaacattaatgctaacggtaacatttgtttggacattctaaaggatcaatggtcaccagccttgactttatctaaggttttgttgagcatctgttccctgttaacagacgctaacccagatgacccattggtccctgaaatcgctcacatctacaagaccgatcgtccaaaatatgaagctaccgctagagagtggactaaaaagtacgctgtctaa

SEQ ID NO: 4598 - DNA, 567 bp, Artificial Sequence
  Optimized genes for Saccharomyces cerevisiae
atgaacccacaagtctcaaacattatcatcatgttagtcatgatgcaattgtctcgtagaatcgatatggaggatcctactattatcatgtacattagaattttgtattgttcctccataggcatttcttggattatctaccaaatggccagaaaacgtattgttgccaaaaacgacatgaccactatgaagtacgtggaacccgggaacgctatgagtggtgaaggtgaaaagttgcaggtcaccaccgttagagactacgacttgaaggaaatcgattccgctatcaagtccatttacaccggtatggctatgatgggtttcatgcacctatatttgaagtatactaacccattgttcatgcaaagcatttctccagtaaagtctgctttggagcacaatgaagttaaaatccatttattcggtaagccagctacaggtgaccttaaaagaccttttaaggctccatctctgtttggtggtatgggtcaaactggaccaaagactgataagaaatcgattgaagaagctgaaagggctggtaatgccggtgttaaggcagaataa

SEQ ID NO: 4599 - DNA, 483 bp, Artificial Sequence
  Optimized genes for Saccharomyces cerevisiae
atgggtaagtctcatggttatcgttccagaaccagatacatgtttcaaagagacttcagaaagcacggtgctgttcatttgagtacctacttgaaggtttataaggtaggagatattgtggatattaaagctaacggttccatccaaaagggtatgccacacaagttctatcaaggtaaaactggtgttgtttacaacgtcaccaagtctagcgttggtgtcatcattaataagatggtcggtaacagatacctagaaaagaggttgaatttgcgtgttgagcatattaagcactctaagtgtagacaagaattcttagaaagagttaaagctaacgcagccaaaagagctgaagccaaagctcaaggtgtcgctgtccaattaaagagacaaccagctcaaccacgtgaatccagaattgtctcaactgaaggcaacgttcctcagactttggccccagtgccatacgaaacatttatctaa

SEQ ID NO: 4600 - DNA, 1665 bp, Artificial Sequence
  Optimized genes for Saccharomyces cerevisiae
atgtccaacaactcttttactaacttcaagctggcaactgaattacctgcttggtctaagctacaaaagatttacgaatctcaaggtaagaccttgtccgttaagcaagaattccaaaaggacgctaagagattcgaaaaactcaacaagaccttcacaaactatgatggctctaagattctgtttgactacagtaagaacttggtcaatgacgaaatcatcgcagctttgattgaattggctaaggaagctaatgtgactggtctacgtgacgctatgttcaagggtgagcacatcaactctactgaagatagagctgtttaccacgttgctttgcgtaacagagctaacaagccaatgtacgtcgacggtgttaatgttgctccagaagttgactctgtcctaaaacacatgaaggagttctctgaacaagttagatccggtgaatggaagggttacaccggaaaaaaaatcaccgatgtcgtcaatattggtatcggtggttctgatttgggtccagtgatggtcactgaagccttaaaacattacgctggtgttttggatgtccacttcgttagcaacattgatggtactcatattgctgaaactctaaaggttgttgacccagaaactacattgtttttgatcgcctccaagacctttaccactgcggaaactattaccaacgctaacacggctaaaaattggtttttatccaagacaggtaacgatccatctcacatcgctaagcacttcgccgctttgtcgacgaacgaaaccgaggttgccaagttcggtatcgacactaaaaacatgttcggtttcgaatcttgggttggggggagatattctgtctggagcgctatcggtctttccgttgctttatacattggttatgacaacttcgaagctttcttgaagggtgccgaggctgttgataaccatttcacccaaacaccattggaggacaacatcccattgttgggaggtttgttatctgtatggtacaacaactttttcggtgcgcagactcatttagttgcaccatttgatcaatacttgcacagattcccagcttatctgcaacaattgtccatggaaagtaatggtaagtccgtaactaggggtaacgtcttcactgactattccaccggctctatcttgttcggtgagcccgccactaacgcccaacactcatttttccaattggttcatcaaggcaccaaattaataccatcggattttattttagcagcccagtctcacaatcctattgaaaacaagttacatcaaaagatgttagccagtaatttcttcgcccaagctgaagctcttatggtcggtaaagatgaagaacaagtcaaggctgaaggcgcaactggtggtttggtgcctcacaaggtcttttccggtaacagaccaaccacttctattttggcccaaaaaattactccagccaccctaggtgctttgattgcttactacgaacatgttactttcaccgaaggtgctatctggaatatcaactcatttgatcagtggggtgtcgaattgggtaaggtacttgccaaggtgattggtaaagaattggataactcatcaactatttccacccatgacgcttctacaaatggtttgattaatcaatttaaagaatggatgtaa

SEQ ID NO: 4601 - DNA, 1614 bp, Artificial Sequence
  Optimized genes for Saccharomyces cerevisiae
atgcacttctctctaaagcaattggccgtggctgcattttacgctacgaacttaggctccgcttatgtgatcccacaattcttccaagaagctttccaacaagaggaacctattgaaaactaccttccacaattgaatgacgacgacagcagcgccgtcgccgctaacatcccaaagccacatattccatacttcatgaagccgcacgttgaatctgagaagttgcaagacaaaataaaggttgatgacctaaatgcaacagcgtgggatttgtacagattggctaactactctactcctgactacggacacccaactagagtcattggttctaagggtcacaacaaaaccatggaatatatcttaaacgtattcgatgatatgcaggactattatgacgtctctttacaagaattcgaagctttgtctggtaagattatctctttcaacctttcagacgcagaaactggtaaaagtttcgctaacactactgctttcgctttatctccaccagttgacggttttgttggtaagttggttgagatcccaaacttgggttgcgaagaaaaggattatgcctctgtcgtgccaccacgtcataacgaaaagcaaatcgctttgattgaaagaggtaagtgtccatttggtgacaagtctaacttggctggcaagttcggtttcactgctgttgttatctacgataatgaacctaagtccaaagagggtttacatggtactttgggcgaaccaaccaagcacaccgttgccactgtcggtgttccatataaagttggtaaaaagttgattgctaatatcgctttgaatatcgattactccctatactttgctatggactcttatgtcgaattcattaagacccaaaacattattgctgacacaaagcatggtgatcccgataatattgttgcattgggtgcccattcagattcagtcgaggaaggtcctggtatcaacgacgatgggtccggtaccatatcgttgttaaatgtcgctaagcaattgacccacttcaagatcaataacaaagttagatttgcttggtgggctgctgaggaagaaggtctattaggttctaatttttatgcctacaacttgaccaaagaagaaaactccaagatccgtgtctttatggattacgatatgatggcttccccaaactacgaatacgaaatttacgacgcgaacaacaaggaaaacccaaagggttctgaagaactgaaaaacctctacgttgactactataaggcccaccacttaaactacactttggttccatttgacggtagatccgattacgttggttttattaataacggaattccagccggtggtattgccaccggtgctgaaaagaataatgttaacaacggtaaggtcttggatagatgttaccaccagctgtgtgatgatgtatctaacttgtcctgggatgctttcattactaacaccaagttgattgcccattccgtcgcaacatacgctgacagtttcgaaggtttccctaagagagaaactcaaaaacataaggaagttgatatcttgaacgcccaacaaccacaattcaaatacagggctgactttttgattatctaa

SEQ ID NO: 4602 - DNA, 1095 bp, Artificial Sequence
  Optimized genes for Saccharomyces cerevisiae
atgtctgctccaaagaagattgtcgtcttaccaggtgatcacgtcggtcaggagatcactgctgaagctattaaggttttgaaggccatttccgacgtcagatccaacgttaagtttgatttcgaaaaccacttgattggtggtgctgccatcgacgccacaggtgttccattaccagacgaagcgctagaagccagcaagaaggctgatgctgttttgttgggtgctgttggtgggcctaaatggggtactggttctgtcagaccagaacaaggtttattgaagattcgtaaagaattgcaattgtacgctaacttgagaccatgtaacttcgctagtgattccttgctcgacttgtctccaattaagccacaattcgctaagggtactgattttgttgtggttagagaattggtaggcggtatttacttcggcaagagaaaggaagatgacggtgatggtgttgcctgggattctgaacaatacactgtccctgaagttcaaagaatcacacgtatggctgcattcatggctctacaacacgaacctccattaccaatctggtctctggataaggctaatgttttggcttcctctagattgtggaggaagaccgtggaagaaactatcaagaatgaattcccaaccttaaaagtccaacatcaactgattgacagcgcagctatgattttggtcaagaacccaactcatttgaacggtatcattataacctctaacatgtttggtgatattatttctgacgaagcttctgtgattccaggatcattgggtcttttgccatcggcctctctagcatctttgccggacaagaatacggcatttggattgtatgaaccatgtcatggtagtgctcccgatttaccaaaaaacaaagttaatcctatcgccactatcttgtccgccgctatgatgttaaagttatcccttaacttgcctgaggaaggtaaggctatcgaagacgccgttaaaaaagtcttggatgctggcatcagaaccggtgacctaggtggttcaaactccactaccgaggttggtgacgctgtagctgaagaggtcaagaaaatcttggcctaa

SEQ ID NO: 4603 - DNA, 2400 bp, Artificial Sequence
  Optimized genes for Saccharomyces cerevisiae
atggtgttgcctattttgccattaattgacgatttggcatcctggaattctaaaaaagaatacgtctctttagtcggtcaagttctgttggacggttcttctttatcgaatgaggaaattttacaattctccaaggaagaagaagttccacttgtggctctatccttaccatctggtaagttctctgatgacgaaattatcgcgttcttaaacaatggtgtttcctccttatttatcgccagccaagacgctaagaccgctgaacacttggttgaacaactgaacgttcctaaggagcgtgtcgtcgtcgaagaaaacggtgtattttctaaccaattcatggttaaacaaaaattttctcaggataagatcgtttccatcaagaagctttccaaagatatgctaacaaaggaggtcttgggtgaagttagaactgaccgtccagacggtttgtacactaccttggttgtggatcagtacgaacgttgtctgggtctagtttattcttccaagaaatccattgctaaggccattgatctcggtagaggtgtttactactctcgttcccgtaacgaaatctggattaagggtgagacgtcaggtaacggccaaaaattgttacaaatatcaactgattgtgattctgacgccctaaagtttatcgtcgaacaagaaaacgttggtttttgtcacttggaaaccatgtcttgtttcggtgaattcaagcacggtttggtgggtttggagtctttactaaagcaaaggttgcaagatgctccagaagagtcatacaccagaagattgttcaacgattctgctttgctagatgccaaaatcaaagaagaagccgaagaacttactgaggctaagggtaagaaggaattgtcttgggaagctgcagatctgttttacttcgcccttgccaagttggtcgctaatgacgtttctttgaaggacgtcgaaaataacttgaacatgaagcatttgaaggtcaccagaagaaagggagatgctaagccaaagtttgttgggcaaccaaaagctgaagaagaaaagttgactggtccaatccacttggatgtggtaaaagcttctgataaggtaggtgtccaaaaggcattgagtagacctattcaaaagacaagtgaaatcatgcatttagttaaccccattatcgaaaacgttagagacaaggggaactcagctttgcttgaatacactgaaaagttcgatggtgttaagttgtctaatccagtcttaaatgctccattcccagaagaatacttcgaaggtttgacagaagaaatgaaggaagctctagacttgagcattgaaaacgttagaaaattccatgctgctcaattgcctaccgaaactttggaggtcgaaactcaacctggtgtcttatgttctagattcccaagaccaatcgaaaaagttggtttatatatcccaggtggtactgccattttgccgagtaccgcattgatgttgggtgtccccgctcaagtcgcccaatgtaaggaaattgtttttgcctccccaccaagaaagtctgatggtaaggtttccccagaagttgtttatgtcgctgaaaaggttggtgcttccaaaattgttttggctggcggtgcacaagccgtcgctgctatggcctacggtactgaaactattccaaaggttgacaaaatactaggtccaggtaaccaatttgttaccgctgctaagatgtacgtacaaaacgatactcaagctttatgttcgattgatatgccagccggccctagcgaagtcttggtcatcgccgacgaggacgctgacgtcgacttcgttgcatctgatttgttgtctcaggctgagcatggtattgattcccaagtcattttggttggagtaaatttaagtgaaaagaaaatccaagaaattcaagatgctgtccacaaccaagccctgcagttgccaagagtggacatcgttagaaaatgcatcgctcattcgactatcgttttgtgtgacggctatgaagaagccttggaaatgagcaaccagtacgcaccagagcacttgattttacaaatcgctaatgctaacgactatgttaaattggttgacaacgctggttctgtcttcgttggtgcttacacaccagaatcatgtggtgattattcttccggtactaaccacactttgccaacctatggttacgccaggcaatactcaggtgctaacactgctaccttccaaaagttcattaccgctcaaaacattacccctgaaggcctcgaaaatattggtagagcggttatgtgcgtcgctaagaaggaaggtttggacggtcatagaaacgccgttaagattagaatgtccaagttgggattaatcccaaaggactttcaataa

SEQ ID NO: 4604 - DNA, 333 bp, Artificial Sequence
  Optimized genes for Saccharomyces cerevisiae
atggtttctcaagaaaccattaagcacgttaaggatttaatcgctgaaaacgaaatctttgttgcttctaaaacttattgtccatactgtcacgcagctttgaacacactattcgagaagttaaaagtgcctcgttccaaggtcctggttttacagttgaatgatatgaaggaaggtgctgacattcaagccgccttgtacgaaatcaacggtcaaagaaccgtcccaaatatttacattaacggtaagcatatcggtggtaacgatgacttgcaagaacttagagaaactggcgaattggaagagttgttggaaccaattttggctaactaa

SEQ ID NO: 4605 - DNA, 1503 bp, Artificial Sequence
  Optimized genes for Saccharomyces cerevisiae
atgtccttcgatgatttgcataaggccacagaacgtgccgtcattcaagccgtagatcaaatctgtgatgactttgaagttacaccagaaaagttagacgaactaactgcttacttcattgaacaaatggaaaagggtttggctccaccaaaggaaggtcacacgttggcttctgataaggggttgccaatgattccagctttcgttactggtagcccaaacggtaccgaaagaggtgtcttgttggcagctgatttgggaggtactaatttcagaatttgttctgttaacttacacggcgaccatacttttagtatggaacaaatgaaatctaaaattcctgacgatttgttagatgatgaaaacgttacttctgacgacttgttcggttttctggctagaagaaccttggctttcatgaagaagtaccaccctgacgaattggccaaaggtaaagatgccaaacctatgaagttgggttttactttcagctatccagtcgaccaaacctcattgaactctggtaccttgatcagatggactaagggtttcagaatcgctgatactgttggtaaggatgttgttcaactataccaagagcaacttagtgcccaaggtatgccaatgattaaggtcgtggctttaaccaacgacactgttggtacctacctctcccattgttacacctctgataatactgactccatgacttccggtgaaatctccgaaccagtcattggttgcatctttggcaccggtacgaacggttgttatatggaagaaatcaacaaaataacaaaattgccacaggaattaagagacaaattgattaaggaaggtaagacccacatgatcattaatgttgagtggggcagtttcgataacgaactaaagcatttaccaactactaagtatgacgtcgtgatcgatcagaagctatctactaacccgggttttcatttgttcgagaagcgtgtctctggtatgtttttaggtgaagtcttgagaaatattttagtcgaccttcattctcagggtttattgttgcaacaatacagatctaaggagcaactgccaagacacttgaccacccccttccaattgtcctctgaagtactttcccacattgaaatcgacgactccaccggtttgagagaaacagagttatctttactacaatctctaagactgccaactactcctactgaaagagtgcaaatccaaaagttggttagggctatttctcgtagatctgcttacttggcagccgttccattggctgccattttgatcaagaccaacgctttgaacaagcgttatcacggtgaagttgaaatcggttgcgacggttcagtcgttgaatactacccaggtttcagatccatgttgagacatgctttggctttatcgcctttgggcgctgaaggtgaaagaaaggttcacttgaaaattgctaaggatggatcaggtgtcggtgcggctctttgtgctttggttgcataa

SEQ ID NO: 4606 - DNA, 1569 bp, Artificial Sequence
  Optimized genes for Saccharomyces cerevisiae
atgaagttctctgctggtgccgtgttatcttggtccagcttgcttctcgcttcttccgttttcgctcagcaagaagctgtcgcccctgaagattccgccgttgtcaaattggctactgactctttcaacgaatacatccaaagtcacgatcttgttttggctgaatttttcgcaccgtggtgtggtcactgtaaaaacatggctcccgaatacgttaaggctgctgaaaccttggtcgaaaaaaacattactttggctcaaatcgactgtaccgaaaaccaagacttatgtatggaacataacattccaggtttcccatccttgaagattttcaagaattcagacgtgaacaactcgattgactacgaaggtccacgtactgctgaagctattgtccaatttatgattaagcaatcccaaccagccgttgctgtagttgctgacctgcctgcctatttagctaatgaaacatttgtgactccagttattgttcagtctggtaaaatcgacgctgatttcaacgctaccttctactccatggctaacaagcatttcaacgattatgattttgtctctgccgagaatgctgacgacgatttcaagttgtcaatctatcttccaagtgctatggacgaaccagtggtctacaacggcaagaaggctgatattgctgatgctgatgtattcgagaagtggctgcaggtcgaagcactaccttactttggtgaaattgacggttctgttttcgcacaatacgtagaatctggattaccattgggttacttgttctataatgatgaagaagaattggaagaatacaagccattgtttacggaattagctaagaagaatagaggtctaatgaactttgtttctatcgacgcaagaaaattcggcagacatgctggtaacctaaatatgaaagagcaatttccattgttcgctatccacgatatgaccgaagacttaaagtacggtttgcctcaattgtctgaagaagccttcgatgaattgtctgacaaaattgttttggaatctaaggctatcgagtccttggtcaaagattttttgaagggtgatgccagcccaatcgtcaagagtcaagaaatctttgagaaccaagattcttcagtcttccaattggttggtaaaaatcacgatgaaattgtcaacgatccaaagaaggatgttttggttttgtactatgctccatggtgcggtcattgtaagagattggcacctacttaccaagaactagccgacacatacgccaatgccacttctgacgttttgatagcaaaattagaccacactgaaaacgacgttagaggtgttgttattgaggggtatccaaccatcgtcttgtacccaggtggtaagaagtccgaatccgtcgtttaccaaggttccagatcgctagattctttatttgatttcatcaaggaaaacggtcatttcgatgtcgacggtaaggcgttatatgaggaagctcaagaaaaggctgccgaagaagcggatgccgatgccgaactggccgacgaagaggacgctattcacgacgaattgtaa

SEQ ID NO: 4607 - DNA, 1251 bp, Artificial Sequence
  Optimized genes for Saccharomyces cerevisiae
atgtctctatcctctaagttgtcggttcaagacctagacctgaaagataagcgtgtttttattagagtcgactttaacgtaccattggatggtaaaaagattactagcaaccaaagaatcgtggccgctcttccaacaattaagtacgtcttggaacaccacccaaggtacgttgttttggcctctcaccttggtagaccaaacggtgagagaaatgaaaaatattctttggccccagtggccaaggaactacaatccttgttaggtaaggatgttacttttttgaacgactgtgtcggtcctgaggttgaagccgccgtcaaggcttccgcgcctggtagtgttattttgttagaaaacttgagataccacattgaagaagaaggttctagaaaggtcgatggacaaaaagtcaaagccagtaaggaagatgttcaaaagtttagacatgaactgtcctctttggctgatgtctacatcaacgacgcattcggtactgctcatagagctcactcttccatggtgggtttcgatttgccacaacgtgcagctggtttcttgttagagaaggaattgaagtacttcggtaaggctttggaaaatccaaccagaccatttttagcaattcttggcggtgccaaggttgccgataagattcagttgatcgataatttattggataaagttgatagcatcatcattggtggtggtatggctttcactttcaagaaggtcttggaaaatactgaaattggtgactccatcttcgacaaggctggtgctgaaatcgttccaaaactcatggaaaaggctaaggctaagggtgttgaagtcgttctaccagtcgacttcattatcgctgacgctttctctgctgatgctaacaccaaaaccgtcaccgacaaagaaggtatacctgctggttggcaaggtttggacaacggtccagaatcaagaaagttgttcgctgctacagttgccaaggctaagacgatcgtatggaacggccctcccggggttttcgaatttgaaaagtttgcagctggtactaaggctttattagacgaggttgttaagtcttcagcagctggtaacactgttattattggaggtggtgacactgctactgtcgctaaaaagtatggtgtcaccgataagatctcacatgtatctaccggtggtggtgcctctttggaattattggaaggcaaggagttgccaggcgtggccttcttgtccgaaaaaaaataa

SEQ ID NO: 4608 - DNA, 1086 bp, Artificial Sequence
  Optimized genes for Saccharomyces cerevisiae
atgaaaggtctcattctggttggtggttatggaactagattaagacctttgactttgactgtgccaaagccgctagtcgaattcggtaacagaccaatgattctacaccaaatcgaagctttagctaatgctggcgtcaccgacatcgttttggctgttaactatagacccgaagtaatggtagaaacattgaagaaatacgaaaaggaatacggtgttaacattacgttctctgttgaaaccgaaccattgggtactgccggtcctttgaagttggccgaagatgtcttgaagaaagataattcaccattcttcgtcttgaattctgatgtcatttgtgaatacccatttaaggaattggcagactttcataaagcacatggtggcaagggaactattgttgctactaaggtcgacgagccatctaaatacggtgttatcgttcacgacattgctactccaaacttaatcgaccgtttcgttgagaagcctaaagaattcgttggcaacagaattaacgctggtttatacattttgaacccagaggttattgatttgatcgaaatgaagccaactagcatcgaaaaggaaaccttcccaattttggttgaagagaagcaattatactcctttgatttggaaggtttttggatggacgttggtcaaccaaaagacttcttatctggtaccgtgctgtatttaaactccttggctaagaggcagcctaagaagttggctactggtgccaacatcgtcggtaacgctttgattgatccaaccgctaagatctcttcgacagcgaagattggtccagatgtcgttatcggtccaaatgtcaccatcggtgacggggtccgtatcactagatccgttgtcctatgcaatagtacaataaagaaccactcattggttaaatccactatcgttggttggaactccaccgtcggtcaatggtgtagacttgaaggtgttaccgttttgggtgatgatgtggaagtgaaggatgaaatttacattaatggtggtaaggtacttcctcataaatctatctctgacaacgtcccaaaggaagccattattatgtaa

SEQ ID NO: 4609 - DNA, 171 bp, Artificial Sequence
  Optimized genes for Saccharomyces cerevisiae
atggcccacgaaaatgtttggttttctcatccaaggcgtttcggtaagggttccagacaatgtagagtctgttcttctcacactggtttggttagaaaatatgatttgaacatttgccgtcaatgtttcagagaaaaggctaacgacatcggtttccataagtacagataa

SEQ ID NO: 4610 - DNA, 180 bp, Artificial Sequence
  Optimized genes for Saccharomyces cerevisiae
atgactatcgctccaatcaccggtactattaaacgtagagttattatggatatcgtcttgggtttctctttgggtggtgttatggcctcctattggtggtggggtttccacatggacaagattaacaaaagagaaaagttttacgctgaattagctgagagaaagaagcaagaaaattaa

SEQ ID NO: 4611 - DNA, 342 bp, Artificial Sequence
  Optimized genes for Saccharomyces cerevisiae
atggctggtttgaaggacgttgttacacgtgagtacactattaacctgcataagagattacacggtgtgtccttcaaaaaaagagctccaagagctgtcaaggaaatcaaaaagtttgccaagttgcacatgggcactgatgatgtcagacttgcccctgaattgaaccaagctatctggaagaggggtgttaaaggtgtcgaataccgtttaagattgagaatttctagaaagagaaacgaggaagaagatgcaaagaatccactattctcttatgttgaaccagttttggtagcttctgctaagggtttgcaaaccgtcgttgttgaagaagacgcctaa

SEQ ID NO: 4612 - DNA, 321 bp, Artificial Sequence
  Optimized genes for Saccharomyces cerevisiae
atgtcaactgaatctgctctaagttacgccgcccttatcttggctgacagcgaaattgaaatttcctctgaaaagttgttaactttgaccaatgctgctaacgttccagttgaaaacatttgggcagatatcttcgctaaggccttggatggtcaaaacttgaaagacttgttagttaacttctccgctggtgcggccgctccagcaggcgtcgccggaggtgtcgctggtggtgaggctggtgaagctgaagctgaaaaggaagaagaagaagctaaggaggaatctgacgacgatatgggtttcggtctgtttgattaa

SEQ ID NO: 4613 - DNA, 600 bp, Artificial Sequence
  Optimized genes for Saccharomyces cerevisiae
atggctatttctaagaacctaccaatcttgaagaaccacttcagaaagcattggcaagagagagtcaaagtccacttcgaccaagctggtaagaaagtttctagaagaaatgctagagctaccagggccgcaaaaatcgctcccagacctttggacttgttacgtccagtcgtgagagccccaactgttaagtataatagaaaggttcgtgctggtcgtggttttactctggccgaagttaaggctgctggtttgactgctgcctacgccagaactattggtattgccgtagatcatagaaggcaaaatagaaaccaagagattttcgacgcgaacgttcaaagattaaaggaataccaatcaaagattattgtctttccaagaaacggtaaagctccagaagcagaacaagtcttgtctgctgctgctaccttcccaatcgcccaacctgctacagatgttgaagccagagctgttcaggataacggtgaatccgcttttagaacccttcgtttggctagatccgaaaaaaagttcagaggcatcagagaaaagcgtgctagagaaaaagctgaagcagaagccgaaaagaagaagtaa

SEQ ID NO: 4614 - DNA, 477 bp, Artificial Sequence
  Optimized genes for Saccharomyces cerevisiae
atggaaccactaatatctgctccatacctgaccactactaagatgagtgccccagctactttggacgcagcttgtattttctgtaagatcatcaagtctgaaatcccatcctttaagttgattgagactaagtactcatatgccttcttggacatccagcccaccgctgaaggtcacgcattgattattccaaagtatcacggcgccaagttacatgatattccagatgaattcttaacagatgctatgcctattgcgaagagactagccaaagctatgaaattggatacctacaacgttttacaaaacaatggtaaaatcgctcatcaagaagttgaccacgttcacttccacttgatccctaagagagatgaaaagtctggtttgattgtcggttggccagctcaagaaactgactttgataaattgggtaaattgcataaggaacttttggctaagttagagggttccgactaa

SEQ ID NO: 4615 - DNA, 321 bp, Artificial Sequence
  Optimized genes for Saccharomyces cerevisiae
atgagtgattccatcatttccttcgctgctttcattttggccgatgccggtttggaaatcacctctgacaacttgttgactatcactaaggccgccggagccaacgttgataatgtctgggcagacgtttacgctaaggctctagaaggtaaagacttaaaggagattttatctggtttccacaacgcgggtccagttgctggtgctggtgctgcctctggcgctgctgccgctggtggtgacgcagctgctgaggaagaaaaggaagaagaagctgctgaagaatcagacgatgatatgggttttggtttgtttgattaa

SEQ ID NO: 4616 - DNA, 261 bp, Artificial Sequence
  Optimized genes for Saccharomyces cerevisiae
atgttgaacagatgtatctctagaaatactcgtctacctgttaaccttagaattgcttctagattttactctgatggtccattaggtggtgccggtccaggtaacccacaggatatcttcattaagagagaacgtgcaaaagaagactattacgctaggcaacaagaaagagaacaattggctcacgtcaaagagcaattgaaggaacataagaagaagttggaaaacttagaaaataaaattaacaacttgtccaagtaa

SEQ ID NO: 4617 - DNA, 546 bp, Artificial Sequence
  Optimized genes for Saccharomyces cerevisiae
atgggtttatacgcttcaaagctattctctaacttgtttggaaacaaggaaatgagaatcttgatggttggtttagacggtgctggtaaaactactgttttgtacaaactgaaattgggtgaagtcattaccaccattccaactatcggtttcaatgttgaaacagtacaatataagaacatctccttcactgtttgggacgtcggtggccaggatagaataagatctctttggaggcactactacagaaacactgaaggtgtcattttcgttatcgattccaatgatagatctagaattggtgaagctcgtgaagtcatgcaaagaatgttgaacgaagatgaactacgtaacgccgtttggttggtgtttgccaataagcaagacttgccagaggctatgtctgctgcagaaatcaccgaaaagttgggtttacatagtattagaaacagaccttggttcattcaatctacctgtgctacttcgggtgaagggttgtatgaaggtttggagtggttaagcaacaacttgaagaatcaatcctaa

SEQ ID NO: 4618 - DNA, 1287 bp, Artificial Sequence
  Optimized genes for Saccharomyces cerevisiae
atgaccgcagctaagccaaacccctatgcggctaagccaggtgattatttatctaatgtcaacaacttccaactaatcgattctactttgagagaaggtgaacaattcgctaatgcttttttcgacactgaaaaaaagatcgaaatcgctagagcattggatgacttcggtgttgactacattgaactgaccagcccagttgcttccgaacaaagtagaaaggattgtgaagctatttgtaagcttggtttgaaagctaagattttgactcatattagatgtcacatggatgatgccaaagttgcagtagagactggagtcgatggtgtggatgtcgttatcggtaccagtaagtttcttagacaatacagccacggtaaagacatgaattacattgctaagtctgcagttgaagttattgaattcgtcaaatctaagggtattgaaattcgtttctcttccgaagactcttttagatctgacttggtggacttactaaacatttacaagacggtcgacaaaatcggcgtgaatcgtgttggtattgctgacactgtcggttgtgctaacccaaggcaagtttatgaattgatcagaaccttgaagtccgttgtctcctgtgacatagaatgtcatttccataacgatacaggctgcgccattgctaatgcctacacagctttggaggggggtgccagactgatcgacgtttcggttctcggtataggtgaaagaaatggtattactcctttaggtggtctaatggctagaatgatcgttgctgctccagattacgttaagtctaagtacaagttgcacaagattagagatattgagaacttggtcgctgacgctgttgaagttaacattccttttaataaccctatcactggtttctgcgcttttacccataaagctggtattcatgccaaggccatcttggctaacccatctacttacgagatcttggacccacacgacttcggtatgaagcgttatattcacttcgccaacagattgaccggttggaacgccatcaaagctcgtgttgatcagttaaacttgaacttaactgacgatcaaattaaggaagtaactgctaagatcaagaagttgggtgacgtcagatcattgaacatcgacgatgtcgattcaatcattaagaactttcacgctgaagtctctaccccacaagtcttatccgctaagaagaacaaaaagaacgattccgatgttccagaattggccacaatcccagccgccaagagaaccaaaccatccgcttaa

SEQ ID NO: 4619 - DNA, 363 bp, Artificial Sequence
  Optimized genes for Saccharomyces cerevisiae
atggccggtgtcaaggcttacgaactaagaactaagtccaaagaacaattggcctcacagttggttgacttgaaaaaggaattggctgaattgaaggttcaaaagttgtccagaccatctttgccaaagatcaagacagtcaggaaatctattgcttgtgttttaactgtcatcaacgaacaacaaagagaggctgtaagacaactttacaagggtaagaagtaccaaccaaaggatttacgtgctaagaaaaccagagctttacgtagagctctgaccaagttcgaagcctctcaagttactgaaaagcaaagaaaaaaacagattgcttttcctcaaagaaagtatgcaattaaggcctaa

SEQ ID NO: 4620 - DNA, 546 bp, Artificial Sequence
  Optimized genes for Saccharomyces cerevisiae
atgggtttattcgcttctaagttgttctctaatttgtttgggaacaaggaaatgagaattcttatggtgggtttggatggtgctggcaaaacaaccgttctatataagttgaagttgggtgaagtcattactaccattcctactatcggtttcaacgttgagacagtccaatataagaacatttctttcaccgtttgggacgtaggtggacaagataggatcagatccctgtggcgtcattactacagaaacacggaaggtgttatctttgtcgttgatagcaacgacagatcaagaatcggtgaagcccgtgaagttatgcaaagaatgctaaatgaagatgaattaagaaatgctgcctggttggtctttgctaataaacaagacttaccagaggctatgtccgcagctgaaatcactgaaaagttgggtttgcacagtataagaaacagaccatggttcattcaggccacctgtgctacttccggtgaaggtttgtacgaaggtttggaatggttgtcgaactctttaaaaaactctacttaa

SEQ ID NO: 4621 - DNA, 471 bp, Artificial Sequence
  Optimized genes for Saccharomyces cerevisiae
atgggtaaggacaacaaggaacacaaggaatccaaagaaagtaagaccgttgataattatgaggccagaatgcctgctgttttgcccttcgctaagccattggcctctaaaaagctgaacaaaaaggtgttgaaaacagttaagaaggcctctaaagctaagaacgttaaaagaggtgttaaggaagtcgtgaaggctctaagaaagggtgaaaagggtcttgtagtcattgctggagatatcagccctgctgatgtcatttcgcacattccagtcttgtgtgaagatcattccgttccatacatctttattccatctaagcaagacttaggtgcagctggcgccactaagcgtccaacttctgttgttttcatcgtcccaggttcaaataagaagaaggacggtaaaaacaaggaagaagaatacaaagaatctttcaacgaggtcgttaaggaagtccaagctttataa

SEQ ID NO: 4622 - DNA, 1089 bp, Artificial Sequence
  Optimized genes for Saccharomyces cerevisiae
atgtctagaccacaagtcaccgtccattcgttgactggtgaagccacggctaatgccttgccattgccagccgttttttctgctcctattagacctgatatcgtgcacaccgttttcacttctgttaacaagaacaagagacaagcctacgctgtatctgaaaaagctggccaccagacctctgcagaatcctggggtaccggtagagctgttgctagaatcccaagggtcggtggcggtggtactggtaggagtgggcaaggtgcctttggcaatatgtgtcgtggtggtagaatgttcgccccaaccaagacttggagaaagtggaatgttaaggtcaaccacaacgaaaagagatacgctacagcatccgctatcgctgctactgcggttgcctccttggttttggctagaggtcatcgtgtcgaaaaaattcctgaaattccactggtcgtttcaaccgacctcgaatccattcaaaagacaaaggaagctgttgccgcacttaaggctgttggtgcccattctgacttgctaaaagtcttgaagtctaagaagttgcgtgctggtaaaggtaagtacagaaatagaagatggacccaaagacgtggtccactggtcgtctacgctgaagacaatggtattgttaaggctttgagaaacgttccaggagtagaaactgctaacgtggctagcttgaacttattgcaattagctccaggtgcccaccttggtcgtttcgttatctggactgaggccgctttcaccaaattagatcaagtctggggtagtgagactgtcgcctcttcaaaagtcggatatactttaccttcccacattatctccacatccgatgttactagaataattaactcttctgaaattcaaagcgctatcagaccagcaggtcaagctacccaaaagagaactcacgttttaaagaaaaaccccttaaagaacaagcaggtgttgttgagattgaacccatatgcgaaagttttcgccgctgaaaagctaggttctaagaaagcagagaagaccggtactaagccagctgctgtttttgctgaaactctaaagcatgattaa

SEQ ID NO: 4623 - DNA, 597 bp, Artificial Sequence
  Optimized genes for Saccharomyces cerevisiae
atgcctcgtgtcgctattatcatttacacgttgtatggtcacgttgcggcaacagctgaagccgagaaaaagggtattgaagctgccggtggttcagccgatatttaccaggtagaagaaactttgtccccagaagttgtcaaggctttaggtggtgctccaaagcctgattacccaatcgctacccaagacacattgaccgaatacgacgctttcctgttcggtattccaactagatttggtaatttcccagcccaatggaaggccttctgggacagaactggaggtttatgggcaaagggtgctttgcacggcaaagttgctggttgttttgtttctactggtaccggtggaggtaacgaagccactattatgaactctttgtccactttagcccatcatgggataatctttgtccccctaggttataaaaacgttttcgctgaattgaccaacatggatgaagtccatggtggctctccatggggtgctggtaccatcgctggttctgatggttccagaagcccaagtgctttggaacttcaagtgcacgaaatccaaggtaagaccttctacgagactgttgcaaagttttaa

SEQ ID NO: 4624 - DNA, 963 bp, Artificial Sequence
  Optimized genes for Saccharomyces cerevisiae
atgtccacttttgaaactttgattaaacgtggtgggaacgaagctatcaaaattaaccctccaactggtgccgattttcatattacctccagaggttcggactggttctggacctgtttctgttgttacttgttgttcggtttaatcctaactttcttgatgtttaggaagccagttaacgatagatttttctacctcactggtatcgctcctaacttcttcatgtgtatcgcctactttacaatggctagcaacttgggatggattccagtcaaggccaaatacaaccacgtccaaacatctacccagaaggaacatccaggttatcgtcaaattttctattctagatttgttggttggttcttggcattaccttggcccattatccaaatttgtatgcttgctggtacgccattctggcaaatggccttcaacgtctgcattacagaattcttcaccgtttgttggttaatcgctgcctgcgttcattcaacctacaagtggggttactacaccatcggcttgggtgctgctatcgtcgtctccatttccgtgatgactacctcttataatttggtaaaacaaagagataatgacattagactgactttcttagtttttttttctataattatgtttttatggattatcgcatatccaacttgttttggtatcactgacggtggtaatgttttgcaaccagactctgctggtatcttctacggtatcattgatttgattttgatgtgtttcatcccgactttgttggttcctattgctaaccacttcggtgctgacaagttgggttaccacttcggcccatctgatgccgaggcggttatggctccaaaggcaccagttgcttcaccaagaccagctgctaccccaaatctaagtaaggataagaagaagaaatctaaaaagtctaaaaagtctaagaagtccaagaagtccgaagaataa

SEQ ID NO: 4625 - DNA, 747 bp, Artificial Sequence
  Optimized genes for Saccharomyces cerevisiae
atggctaggacgttcttcgttggtggtaatttcaagttaaacggttctaagcaatctattaaggaaattgtcgaacgtttgaacaccgcttcgataccagaaaacgtcgaggtcgtcatttgtccaccagctacctacttggattactctgtatcacttgtaaagaagccacaagttactgttggcgctcaaaatgcctatttgaaagcctccggtgccttcaccggtgaaaactccgttgaccaaatcaaggatgtcggagctaagtgggttattttgggtcattctgaaagaagaagttacttccacgaagacgataaatttatcgctgacaagactaagtttgcattgggtcagggtgttggtgtcattctatgtattggtgagactttggaggaaaagaaggccggtaaaaccttggatgttgtggaaagacaattaaatgcagttttggaagaagtcaaggattggactaacgttgtcgtggcttacgaacctgtttgggccatcggtactggtctagctgctactccagaagatgcccaagatatccacgcctctatccgtaaatttttagcttctaagttgggtgacaaagctgcaagcgaactgagaatcttatatggtggttccgctaatggctccaacgcggttacattcaaggacaaggctgacgttgatggttttttggtcggtggggcttctttgaaaccagaattcgttgacattattaactcaagaaactaa

SEQ ID NO: 4626 - DNA, 456 bp, Artificial Sequence
  Optimized genes for Saccharomyces cerevisiae
atgggtagaatgcattctgccggtaagggtatttcttcttcagcaatcccatacagcagaaatgccccagcttggttcaagctgtcttccgaatcggtgatagaacaaatcgtaaaatatgctagaaaaggtttgaccccatctcaaatcggcgtcttattgagagacgcccacggtgttactcaagctcgtgtcatcaccggtaacaagattatgcgtattctaaagtctaacggtttggctccagaaattccagaggatttatactacttgattaagaaggctgtctccgttagaaaacacttggaaaggaatagaaaagataaggacgctaagtttcgtttgattcttatcgaaagtagaatccatagattggctagatactacagaacagttgcagttttaccacctaactggaagtatgaatccgcgactgcttccgctttggttaactaa

SEQ ID NO: 4627 - DNA, 1017 bp, Artificial Sequence
  Optimized genes for Saccharomyces cerevisiae
atgaagttatctactgttcttttgtccgctgggttggcgtccaccacattggctcaattttctaatagcacttccgcatcctctaccgatgttacttcttctagttcaatttccacttcttccggctccgtcaccattacttcttctgaagctccagaatccgataacggtacttctactgctgccccaaccgaaacctctacagaagctccaactactgctatcccaactaacggtactagcaccgaagccccaaccactgctatccctacaaacggaacatctactgaagctccaaccgacaccactacagaagccccaactactgctttgccaaccaacggtacatctaccgaagctccaacggatactaccactgaggctcccaccactggtttaccaaccaacggtaccacttcggcttttccaccaactacatctctacctccaagcaacaccaccactaccccaccatacaacccatccaccgactatactaccgattatactgttgtcacagaatacactacttactgtcctgagccaaccactttcaccactaacggtaagacttacactgtcaccgaacctaccactttaaccatcactgactgtccatgtacgattgaaaagccaactactacttcaaccaccgaatatacagttgttaccgaatacacgacctactgtcccgagccgactacattcaccactaacggtaagacctacactgtcacggaaccaactactttgactatcactgactgcccatgtaccattgaaaagagtgaagcccctgaatcttcggttccagttaccgagtctaaaggtacaactactaaggaaactggcgttaccaccaaacaaactactgcaaatccttccttgacagtgtcaacagtcgttcctgtctcctcttccgcttcatctcactctgttgtgattaacagtaatggtgccaatgtagtcgttccaggtgctttgggtctggccggtgtcgcaatgttgttcctataa

SEQ ID NO: 4628 - DNA, 489 bp, Artificial Sequence
  Optimized genes for Saccharomyces cerevisiae
atgtctcaagtctactttgatgtcgaagccgacggtcaaccaattggtagagttgtcttcaagttgtataatgacattgttccaaagactgctgaaaactttagagctctatgtactggtgaaaagggtttcgggtatgctggttctcctttccatcgtgttatcccagacttcatgttgcaaggtggtgatttcaccgccggtaatggtaccggtggtaagagcatctacggtggtaagtttccagatgagaacttcaagaagcatcacgatagaccaggtttgttgtctatggctaacgcaggtcccaacactaacggatcccagttcttcatcacaaccgttccatgtccatggttggacggtaagcacgttgtttttggtgaagtcgttgatggctacgacattgtgaaaaaagtcgaatccttaggtagtccttccggtgctactaaagccagaattgttgtagctaagtcaggcgaattataa

SEQ ID NO: 4629 - DNA, 648 bp, Artificial Sequence
  Optimized genes for Saccharomyces cerevisiae
atgtctagagccaagagaatcatgaaggaaatccaagccgttaaggatgacccagctgctcacataaccttggaatttgtttccgaatctgacattcaccacctaaaaggcactttcttgggtccaccaggtaccccatacgagggtggtaagtttgttgtggatatcgaagttccaatggaatacccattcaaacctcccaagatgcaatttgataccaaggtctaccatccaaacatttcttccgttactggtgcaatctgtttagatatcttaaaaaatgcctggagtcctgtcattacccttaagtctgccttgatctctttgcaagctttgttgcaatctccagaaccaaacgatcctcaggatgctgaagtcgctcaacattatttgagagacagagaatcattcaacaagactgctgctttgtggactagactatacgcttcggaaactagcaatggtcaaaagggtaacgttgaggaatccgacttgtatggtattgatcatgacttgattgacgaattcgaatctcaaggtttcgaaaaagataagattgtcgaagtattacgtcgtctgggagttaagtccttggacccaaatgacaacaacacagctaacagaatcattgaggaattattgaaataa

SEQ ID NO: 4630 - DNA, 546 bp, Artificial Sequence
  Optimized genes for Saccharomyces cerevisiae
atgatgttgccacgtagcatgaagtttatgactggaagaagaattttccacaccgctacagttagagcattccaatctaccgctaagaagtctctaactattccattcttgccagttttaccccaaaaacctggtggtgtaagaggtacgccaaacgacgcttacgttccaccaccagaaaacaagttggaaggctcataccattggtacatggaaaagattttcgctttatccgtggtccctttggctactactgctatgttgactactggtccactgtcgaccgccgctgactccttcttttccgttatgctattgggttactgttacatggaatttaactcttgtatcacagactacatctctgaaagagtctatggtgtctggcacaaatatgctatgtacatgttgggtttaggttccgccgtttcccttttcggtatttataaattggaaaccgaaaacgatggtgttgttggtttggtcaagtctttgtgggattcttctgagaaggataattcacaaaagatcgaagccaagaaataa

SEQ ID NO: 4631 - DNA, 396 bp, Artificial Sequence
  Optimized genes for Saccharomyces cerevisiae
atgtccgctaaggcagaaaaaaagccagccagcaaggctccagccgaaaagaagccagctgccaaaaagacttcaacatcgactgacggtaagaaaagaagtaaggctcgtaaggaaacttattcctcttacatttacaaggtcttgaagcaaactcatccagataccggtatctctcaaaaatctatgtctattttgaactctttcgttaacgatatttttgaaagaattgctactgaagcctccaagttagctgcgtacaataaaaaatctaccatctcagctagagaaattcagaccgctgtcagattgatcctacctggtgaattggccaagcacgctgtttccgagggtacgagagctgttactaagtattcctcttctacacaagcttaa

SEQ ID NO: 4632 - DNA, 399 bp, Artificial Sequence
  Optimized genes for Saccharomyces cerevisiae
atgtctggaggtaagggtggtaaggccggctctgctgcaaaggctagccaatccagatccgctaaagctggtcttactttcccagtcggtagagtgcacagactgttgagaagaggtaactacgctcaaagaattgggagtggtgctccagtttacttgactgccgttttggagtatttggccgcggaaattttggaactagccggtaacgctgcaagagataacaagaaaacccgtatcattcctaggcacttgcaattggctattcgtaatgacgatgaactaaacaagttgttaggtaatgttacaatcgcccagggtggtgtcttgccaaacatccatcaaaacttgttaccaaagaaatcagctaaggctaccaaggcttctcaagaattataa

SEQ ID NO: 4633 - DNA, 669 bp, Artificial Sequence
  Optimized genes for Saccharomyces cerevisiae
atgtccagctcagaatctatcaggatggttttgataggtccaccaggagccggcaagggtacccaagctcctaacctacaagagagattccacgctgcgcacttggctactggcgacatgcttcgttctcaaatcgcaaagggtacccaattgggtttggaagctaaaaagattatggaccaaggtggtttagtcagtgatgatattatggttaacatgatcaaagacgaattgactaataacccagcctgtaagaacggttttatcttggatggtttcccaagaactattccacaagctgaaaagttggaccagatgttgaaggaacaaggtacaccactggaaaaagctattgaattgaaggttgatgacgagttgttggttgccagaatcaccggtagactaatccatccagcttccggtcgttcttaccacaagattttcaacccaccaaaggaagatatgaaggacgacgtaactggggaagctttagtgcaaagatccgatgataatgccgatgccttgaaaaaaagattggctgcctaccatgctcaaactgaacccattgtcgacttttataagaagaccggtatttgggctggtgtcgacgcttctcagcctcctgctactgtttgggcagatattttaaacaagttaggtaaggattaa

SEQ ID NO: 4634 - DNA, 888 bp, Artificial Sequence
  Optimized genes for Saccharomyces cerevisiae
atgagcgcttccgctcagcactctcaagctcaacaacaacaacaacaaaagtcttgtaactgtgatttgttgttgtggagaaacccagttcagaccggtaagtactttggtggttctttattggcattgttgatcttgaagaaggttaacctaatcacttttttcttgaaggtcgcctacacaatcttattcactacaggtagtattgagttcgtaagtaaattgttcctaggccaaggtttgatcaccaaatacggtccaaaggagtgccctaatattgccggttttattaagccacacattgatgaagctttgaaacaacttccagtcttccaagctcatatcagaaagactgtctttgctcaagtcccaaagcacacgttcaaaacagctgttgccttgttcttgttgcataaattcttctcatggttctccatttggactatcgttttcgtggctgacatttttacttttactttgccagttatttatcattcttacaagcacgaaatagacgctaccgttgctcaaggagtcgaaatctctaagcaaaaaacccaagaattctcccaaatggcttgtgaaaagactaaaccctatttagataaggttgaatctaagctaggtccaatttctaacctggttaagtcaaagaccgcgccagttagctctactgctggtcctcaaactgcctccacctccaagttggctgcagatgtcccacttgaaccagagtctaaagcctacacctcttctgcccaggttatgccagaagtgccacaacacgaaccttccactacccaagaatttaacgtcgacgaactctccaatgaattaaagaagtcgactaagaacttacaaaacgaactggaaaagaacaatgcttaa

SEQ ID NO: 4635 - DNA, 168 bp, Artificial Sequence
  Optimized genes for Saccharomyces cerevisiae
atggactctgcaaagatcattaacattattttgtccttgtttctgcctccagttgctgttttcttggctagaggttggggtaccgactgtattgtcgatatcattttaactatcttagcttggttcccaggtatgctatatgccttgtacatcgttttgcaagattaa

SEQ ID NO: 4636 - DNA, 291 bp, Artificial Sequence
  Optimized genes for Saccharomyces cerevisiae
atgtctactgtcaatgtattgagatactccgctttgggtttgggtctgtttttcggtttcagaaatgacatgatcttaaagtgtaacgctaagaagaaagaggaacaagctcaatatgaagaaaagttgaaattggttgaagaggctaagaaagaatacgctaagttgcacccagtcgtgactccaaaggatgtcccagcaaacgcctcttttaaccttgaagatcctaacattgacttcgaacgtgttattctaaacgctgttgaatctttaaaggaagcctctacctaa

SEQ ID NO: 4637 - DNA, 1824 bp, Artificial Sequence
  Optimized genes for Saccharomyces cerevisiae
atggcctccactgctaatatgatttcccaactaaagaaattgtctatcgctgagccagccgttgcaaaagactcgcacccagatgttaatattgttgatttgatgagaaactacataagccaagaactttctaagatctctggtgttgattcaagtttgatcttccctgctttagagtggacaaacacaatggagagaggtgacttacttattccaatccctagattgaggattaagggtgccaacccaaaagatttggccgttcaatgggctgaaaagttcccatgtggcgactttttggaaaaggttgaagccaacggtccattcatccaatttttcttcaaccctcaattcttagctaaattggtgatccctgacattctaactagaaaagaagactacggatcctgcaagctagttgaaaacaagaaggtcatcattgaattttcctctccaaacattgctaagccattccacgccggtcacttaagatcaactatcattggtggcttcttggcaaacttgtacgaaaaattgggttgggaagtcatccgcatgaattatctgggcgattggggtaaacaatttggtttgttggctgtcggttttgaaagatatgggaacgaagaagccttggtcaaagacccaattcatcatttgttcgacgtttacgttagaattaacaaggacatcgaagaagagggtgactctattccattagaacaatctactaacggcaaggctagagaatacttcaagagaatggaagacggtgacgaagaagccttgaagatctggaaaagattcagagaattttctattgaaaagtacattgatacctatgctagattgaacattaagtacgacgtctactctggtgaaagtcaggtttccaaggaatccatgttgaaggctatcgatctgttcaaggaaaaaggtttaacccatgaagacaagggtgctgttttgatcgacttgaccaagttcaataagaagttgggaaaggctattgttcaaaagtctgacggtactacgttgtatttgactagagatgtcggtgcagctatggatcgttacgaaaagtaccactttgataagatgatctacgtcattgcgtcccaacaggaccttcacgccgctcaattcttcgaaattttaaaacaaatgggtttcgaatgggctaaggatctacaacacgtcaacttcggtatggttcaaggtatgtctactaggaagggtaccgttgttttcttggataacatattggaagaaaccaaagaaaaaatgcatgaagtcatgaagaagaacgaaaataagtacgctcaaattgagcacccagaagaggtagcagatcttgtgggtatctccgctgtgatgattcaagatatgcagggtaagagaatcaataactacgaattcaagtgggagagaatgttgtcttttgaaggtgatacaggtccgtacttgcaatatgctcattccagattgagatcagtagagcgtaacgcttctggtattactcaagaaaagtggatcaatgctgatttttctttactaaaagaacccgcagccaagttattgatccgtttgttgggtcaatatccagacgttttaagaaatgctattaaaactcacgaaccaactactgttgttacctacttgtttaagctcacccatcaagtctctagctgttacgatgtcttgtgggtcgctggtcaaactgaagaattggctaccgcccgtttagctttgtatggtgctgccagacaagtcttgtacaacggtatgcgtttactaggtctgaccccagttgaaagaatgtaa

SEQ ID NO: 4638 - DNA, 1713 bp, Artificial Sequence
  Optimized genes for Saccharomyces cerevisiae
atgtctcaagacgctgccattgctgaacaaactccagtagaacaccttagtgctgtcgattccgcttctcattctgttttatctactccatccaacaaggcagaaagagatgaaatcaaggcctacggtgaaggtgaggaacatgaaccagttgttgaaattccaaagagaccagcttccgcctatgtcactgtctccattatgtgtattatgatcgctttcggtggtttcgttttcggttgggacacaggtactatttctggtttcattaaccaaactgatttcattaggagattcggaatgaaacacaaggacggtactaactacttgtccaaagttagaactggtctaattgtctctatttttaatatcggttgcgctattggtggtattatattgtccaagttgggtgatatgtatggtagaaaggttggtttgatcgttgttgtagtgatttacatcattgggatcatcatccaaatcgcctccattaacaagtggtatcaatacttcattggccgtattatttctggtttgggtgtgggtggtatcgctgtgttgtctccaatgttgatttctgaagttagcccaaaacacttgagaggcaccttggtcagttgttaccaattaatgattactgctggtatctttttaggttattgtactaatttcggtaccaaaaactactctaactccgttcaatggcgtgttccattaggtttgtgttttgcctgggctttgttcatgatcggtggaatgaccttcgtccctgaatcacctagatatttggcagaagttggtaagattgaagaagccaaaagatccatcgctgtctccaataaagtcgcggttgacgatccttctgtcttggctgaggtcgaagctgttttggccggtgtggaagctgaaaagttggctggtaacgccagctggggtgaattgttctcatctaagaccaaggttttacagagattgattatgggcgcaatgattcaatctctgcaacaattgactggtgacaactacttcttttactacggtacaactatctttaaggctgttggtctatctgattccttcgagacttctatagttttaggtattgttaactttgcttctaccttcgttggtatttacgtcgtcgaaagatatggtagaagaacctgccttctatggggcgctgcttcaatgactgcttgtatggtcgtttacgctagtgttggagtgactagactctggccaaacggtcaggaccaaccatcgtctaagggtgcgggtaattgtatgattgtattcgcatgtttttacatcttctgtttcgccacaacctgggctcccatcccatacgtcgtcgtctctgaaaccttccctctaagagttaagtccaaggccatgtctatcgctaccgctgcaaactggctttggggtttcctgatcgggtttttcaccccttttatcaccggtgctatcaacttttattacggctacgttttcatgggttgtttggtatttatgttcttttatgttttattggttgttccggagactaagggtttgaccttagaagaagttaacacaatgtgggaagaaggtgtcttgccatggaagtcagcctcttgggtcccaccatcgagacgtggtgctaattacgatgccgaggaaatgacgcatgatgacaaaccattgtacaagcgtatgttcagcactaagtaa

SEQ ID NO: 4639 - DNA, 1713 bp, Artificial Sequence
  Optimized genes for Saccharomyces cerevisiae
atgtctcaagatgctgctattgctgaacagacccctgttgaacatctctcggcagtagactctgctagccactctgttttatctaccccatcaaataaggctgagagagatgaaattaaggcttatggtgaaggtgaggaacacgaacccgttgtggaaatcccaaagagacctgcctccgcatacgtcaccgtttccatcatgtgtattatgatcgctttcggtggtttcgtcttcggttgggacactggcactatttctggatttattaaccaaactgatttcatcagaagattcggtatgaagcataaggacggtactaactacttgtctaaggttagaaccggtttgatcgtttccatttttaacattggttgtgccattggtggtatcattttgtctaagttgggtgacatgtatggtcgtaaggtgggcttgatcgtcgttgttgtcatctatattattggtatcattattcaaattgcttccattaacaaatggtaccaatacttcattggtagaattataagcggtttgggtgttggtgggattgccgtgttatctccgatgttgatttccgaagtctctccaaagcatttgagaggtactttggtctcctgttaccaattgatgatcaccgctggaatctttttaggatactgtacaaacttcggtaccaaaaactactccaactctgttcaatggagagttccattgggcttgtgtttcgcatgggccttgtttatgatcggtgggatgacattcgttccagaatcaccacgttatttggctgaagtaggtaagattgaagaggctaagagatctatcgcggtttccaataaagtcgctgttgatgatccatcggtcttggctgaagttgaagctgtcttggctggtgttgaagcggaaaaattggctggtaatgccagttggggtgaattattttcttccaagaccaaggtcttgcaaagacttatcatgggtgctatgatccaatctttgcagcaattgactggtgataactactttttctactatggtacaactatttttaaggccgttggtctgagtgattcctttgagacctctatagttttaggtattgtcaacttcgcttccactttcgtcggtatttacgttgtcgaaagatacggtcgtcgtacttgtctgctttggggtgctgcttctatgactgcctgtatggtcgtctacgcaagcgttggtgttaccaggttatggcctaatggccaagaccaaccatctagtaagggtgccggtaactgcatgatcgtttttgcttgtttctacattttctgttttgccactacctgggctccaatcccatatgttgtcgtatcagaaactttcccactaagagtcaaatctaaagccatgtctatcgctactgccgctaactggttgtggggttttttaattggtttctttactccattcatcactggtgctatcaatttctactacggttacgtgttcatgggttgcctagttttcatgttcttctacgtgctattggttgtccctgaaacgaagggtttgacactagaagaagtaaacactatgtgggaagaaggtgttcttccatggaagtccgcttcatgggtcccaccatctagaagaggcgccaactatgacgctgaggaaatggcccacgatgacaagcctttatataagagaatgttctctaccaaataa

SEQ ID NO: 4640 - DNA, 333 bp, Artificial Sequence
  Optimized genes for Saccharomyces cerevisiae
atgaagtaccttgctgcctatttactattggtccaaggtgggaacgctgcgccatctgctgcagatattaaggccgttgttgaaagtgttggtgctgaagtcgacgaggctagaattaatgaattgttgtccagcctggaaggtaaaggttcattagaagaaatcatcgccgaaggtcaaaaaaagttcgctactgtgccaaccggcggtgcctcttccgctgctgctggagctgctggtgctgccgctggtggtgatgccgcagaagaagaaaaggaggaagaggctaaggaagaatctgacgatgacatgggttttggtttgttcgattaa

SEQ ID NO: 4641 - DNA, 498 bp, Artificial Sequence
  Optimized genes for Saccharomyces cerevisiae
atgccaccaaagttcgacccaaatgaagttaaatatttatacttgagagctgtcggtggtgaagtgggcgcgtccgctgccttggccccaaaaatcggtccactaggtctttctcctaagaaggtcggtgaagacatcgccaaggctactaaggagttcaagggtattaaagttacagtccaattgaagattcaaaacagacaagctgcagcctctgtcgtacccagtgcttcctccttggttattaccgctttgaaagagccacctcgtgatagaaagaaggacaagaacgttaagcactcaggtaacattcaactggacgaaatcatagaaattgctagacagatgagggataaaagctttggtagaaccttagcatctgttactaaggaaatcttgggtactgctcaatctgttggatgtagagttgatttcaagaacccacatgatattatcgaaggtattaacgctggtgaaatcgaaattccagaaaattaa

SEQ ID NO: 4642 - DNA, 564 bp, Artificial Sequence
  Optimized genes for Saccharomyces cerevisiae
atgtccagaccaattgttatttccggtccatctggtaccggcaaatccaccttgctgaagaagttgtttgctgaatacccagactcattcggtttctctgttagttctacaactagaactccacgtgcaggtgaggttaacggtaaggattataatttcgtttccgttgacgaatttaagtctatgataaaaaataacgaattcattgaatgggctcaattctcaggtaactactacggttctaccgtcgcttccgtcaagcaagtctctaagtctggtaagacttgtatcttggatatcgatatgcagggtgttaagagcgtcaaggccatcccagaattgaacgctagattcttgttcatcgctccaccttcggttgaagacttaaaaaagagattggaaggtagaggtactgaaactgaagagtctattaacaagagattatctgccgcccaagccgaactagcttacgctgaaaccggagcgcacgataaggtgattgtaaacgatgaccttgacaaagcatataaagaattgaaggattttatctttgctgaaaagtaa

SEQ ID NO: 4643 - DNA, 411 bp, Artificial Sequence
  Optimized genes for Saccharomyces cerevisiae
atggctaaattcttgaaagctggtaaagttgctgtagtggttaggggtcgttatgctggtaagaaggttgttattgtgaaacctcatgacgaaggttctaagtcacacccattcggccatgccttggttgctggtattgaaagatacccatccaaggtcactaagaagcacggtgctaagaaagtcgctaagagaactaaaatcaagccatttatcaaggtcgttaattacaaccatttgttgccaactagatacaccctagatgtcgaagcattcaaaagtgttgtctctaccgagacattcgaacaaccatctcaaagagaagaagccaagaaggttgtcaagaaggccttcgaagaacgtcaccaagctggtaagaaccagtggtttttctccaagttaagattttaa

SEQ ID NO: 4644 - DNA, 1755 bp, Artificial Sequence
  Optimized genes for Saccharomyces cerevisiae
atgggtattcatattccatacttgacttctaagacctctcaatctaacgtcggcgacgccgttggtaatgctgattctgtcgaatttaattcagaacatgattctccatcaaagcgtggcaaaattacgttggaaagccacgaaattcaaagagcaccagcttccgacgatgaagaccgtatccagattaagcctgttaacgacgaagacgatacctccgtgatgatcacctttaaccaatctttgtcccctttcattattactttaactttcgttgcctctatctctggttttatgttcggttatgatactggttacatttcttctgccttgatctctatcggtaccgacttggatcacaaggtcttaacctacggtgagaaggagatcgtgaccgctgcaacttctctaggtgctttgattacatccatttttgctggtaccgctgccgatattttcggtagaaagcgttgtttgatgggttccaatcttatgttcgttattggggctatcctgcaagtcagtgctcacacgttctggcaaatggctgttggtagactcattatgggttttggtgtcggtattggttccttaatagccccattgtttatctccgaaattgctccaaagatgattaggggaagattgactgttatcaactcattgtggttgactggtggtcaattggttgcttacggttgcggtgctggtttgaactacgtcaataacggttggagaattcttgtcggtttatccttgattccaaccgccgtgcaattcacctgtttgtgtttcttgccagatactcctagatactacgtcatgaaaggcgatttggctagagccaccgaagtactaaagagatcgtacacagatactagcgaagagataattgaaagaaaagttgaagaattggttactttgaaccaatcaattccaggtaaaaatgtgccagaaaaggtttggaacactatcaaggaactacacaccgttccaagtaatctaagagccttgatcatcggctgtggtttgcaagctatccaacaatttactggttggaactctttgatgtatttttccggtaccatctttgaaactgttggttttaagaactcgtctgctgtttctatcattgtctccggtacaaacttcatcttcacattggttgccttcttctctatcgacaagattggtagacgtactatcctgttgatcggtttacccggtatgacaatggctttagttgtatgttctattgcttttcattttttaggtatcaagttcgacggggccgttgctgtcgttgtcagtagcggattcagttcttggggtattgtcatcattgtcttcattatagttttcgctgcattctacgcattaggtatcggtactgttccatggcagcaatccgaattgttcccacaaaacgtcagaggtatcggtacctcctatgctactgctaccaactgggccggttccttagtaattgcatctaccttcttaactatgttgcaaaacatcacccctgctggtactttcgcgttcttcgccggtctgtcttgtttgtccactattttctgctacttttgttatccggaattgtctggcctagaattggaagaggttcagacaattttgaaagacggattcaacattaaggcttcaaaggctttagctaagaaaagaaagcaacaagttgctagagtccacgaacttaaatatgaaccaactcaagaaattatcgaagacatctaa

SEQ ID NO: 4645 - DNA, 267 bp, Artificial Sequence
  Optimized genes for Saccharomyces cerevisiae
atgggtaaaggtactccatctttcggtaagagacataacaagtcccacactttgtgtaacagatgtggcagaagaagcttccacgtccaaaaaaagacctgtagttcctgcggttatccatctgctaaaactagatctcacaattgggcagctaaggctaagagacgtcataccactggtacaggaagaatgcgttacttgaagcatgtttcaaggagattcaagaacggttttcaaaccggttctgccaaggccacttccgcttaa

SEQ ID NO: 4646 - DNA, 384 bp, Artificial Sequence
  Optimized genes for Saccharomyces cerevisiae
atgccacaatcatttacctctatcgctagaataggtgactacatcctaaaatccccagttttgtccaagctttgtgttccagtcgctaatcaattcattaacttggccggttacaaaaagttgggtttgaagttcgacgatctgatcgctgaagaaaacccaattatgcagactgccttaagaagattgcctgaagatgaatcttacgctagagcatacagaatcattagagctcatcaaacagagttgactcaccacttattaccacgtaacgaatggattaaagctcaagaagatgtcccatatttgctaccttatattttggaggccgaagccgctgctaaggaaaaggacgaattggataacatcgaagtttctaagtaa

SEQ ID NO: 4647 - DNA, 846 bp, Artificial Sequence
  Optimized genes for Saccharomyces cerevisiae
atgtccgaataccaaccttcattattcgccttgaacccaatgggtttctctcctctggatggttctaaatccacaaacgaaaacgtttctgcctctacttctaccgccaagccaatggttggccaattgatttttgataaattcattaaaactgaagaagatccaatcattaagcaagatacaccaagtaacttggactttgattttgctttgccacaaacagctacggctccagacgccaaaactgtcttgccaattccggagttggacgacgcggtcgttgaatcttttttctcttctagcaccgactccaccccaatgttcgaatacgaaaatcttgaagacaatagtaaggaatggacctcattgttcgataacgatattccagttactactgatgatgtttccttagctgacaaggctatcgaatctactgaggaagtctctctagtcccttcgaatttagaggtgtctaccacttctttcttgcctacccccgttttagaagacgctaaattgactcaaaccagaaaagtaaagaagccaaactctgttgtgaagaagtcccaccatgttggtaaggacgatgaatccagacttgaccatttaggtgtcgttgcttataatagaaagcagagatcaatcccactcagcccaatcgtcccagaatcttccgatccagctgccttgaagagagcaagaaacactgaagctgctcgtcgttccagagcaaggaagttgcaaagaatgaaacaattggaggacaaggtcgaagaactattgtccaagaactaccacctagaaaacgaagttgctagattgaagaagttggttggtgaaagataa

SEQ ID NO: 4648 - DNA, 132 bp, Artificial Sequence
  Optimized genes for Saccharomyces cerevisiae
atgttaatgtctactttgccaggtggtgttattttggttttcatcctagtcggtttggcctgtatcgctatcatttccaccattatttaccgtaagtggcaagctagacaaagaggtttgcaaagattttaa

SEQ ID NO: 4649 - DNA, 648 bp, Artificial Sequence
  Optimized genes for Saccharomyces cerevisiae
atgttgggtattagatcctctgtcaagacctgtttcaagcctatgtctttgacttctaagcgtttgatctcgcaatctttgttggcttcaaagtcaacttacaggaccccaaacttcgatgatgttttaaaggaaaataacgacgctgacaagggtcgttcctatgcatacttcatggttggtgctatgggattgttgtctagcgctggggctaagtccactgtagaaacttttatttcctctatgacagctactgctgacgttcttgcgatggctaaggttgaagtcaacttggccgctattcctctaggtaaaaacgttgtggttaaatggcaaggtaaaccagtctttatcagacatagaaccccacacgaaatccaagaagccaactccgtcgatatgtctgctttaaaggatcctcagactgatgcagacagagttaaagacccacaatggttgatcatgttgggtatttgtacccacttaggttgtgttccaattggtgaagccggtgacttcggtggttggttttgtccatgccatggttctcactatgatattagtggtagaataagaaagggcccagccccactgaatctagagatccccgcttacgaattcgatggcgacaaggtcattgttggttaa

SEQ ID NO: 4650 - DNA, 483 bp, Artificial Sequence
  Optimized genes for Saccharomyces cerevisiae
atgaccgaactgtgtccagtgtacgcacctttctttggggctattggttgtgcttccgctatcatttttactagtttaggtgcagcctacggtacagctaagtccggagttggtatctgtgctacttgcgttttacgtccagatttgttgttcaaaaacattgtcccagttattatggctggtatcattgccatatatggcctcgtagtttcagtcttggtttgttactctttgggccagaagcaagctttatacaccggttttatccaactaggtgccggtttgagcgttggtttgtctggtcttgctgcgggtttcgctatcggtattgtgggtgatgccggtgttagaggttcttctcaacaaccaagattgttcgttggtatgattttgatcttgattttcgctgaagtcctaggtttgtatggtttaatcgtcgctttgttgttgaattccagagccactcaagacgtcgtctgttaa

SEQ ID NO: 4651 - DNA, 474 bp, Artificial Sequence
  Optimized genes for Saccharomyces cerevisiae
atgtcagacgaagaacacactttcgaaaccgctgacgcaggttccagtgctacatatccaatgcaatgttccgccctacgtaagaacggattcgttgtcattaagtctagaccttgtaagattgttgacatgtctacttcgaagactggtaagcacggtcatgccaaggttcacttggttgctattgacatctttaccggtaagaaattagaggatctgtccccatctactcataacatggaagtgccagttgtcaagagaaacgaataccaattgttggacatcgatgatggcttcttgtctcttatgaatatggatggtgatactaaggatgatgtaaaagctccagaaggtgaattgggtgactctttacaaaccgcctttgacgaaggtaaagacttgatggtcactattatctctgctatgggtgaagaagctgccatttccttcaaagaggctgctagaaccgattaa

SEQ ID NO: 4652 - DNA, 498 bp, Artificial Sequence
  Optimized genes for Saccharomyces cerevisiae
atgcctccaaagttcgatccaaacgaagtcaagtatctatacctgcgtgcggttggcggtgaagttggtgcttctgctgctttggccccaaagatcggtccattgggtttgtcacctaagaaggttggtgaagacattgctaaggctactaaggaattcaagggtattaaagtgaccgttcaattaaaaattcaaaacagacaggctgccgcttctgtagtcccatccgcttcctccttagttatcacagccttgaaggaaccaccaagagataggaaaaaggataagaacgtcaagcacagtggtaatatccaattggacgaaattattgagatcgcaagacaaatgagagataagtctttcggtcgtacccttgctagcgttactaaagaaatattgggtactgcccaatctgttggttgtagagtcgactttaaaaacccccatgacatcatcgagggaatcaacgcaggtgaaattgaaattccagaaaattaa

SEQ ID NO: 4653 - DNA, 765 bp, Artificial Sequence
  Optimized genes for Saccharomyces cerevisiae
atggcttacacaaaaattgctcttttcgctgccatcgctgctttggcctctgcccagacccaagatcaaatcaatgaattaaacgtcatcctgaacgatgtaaaatcccacctacaagaatatatctctttggccagtgattcaagctccggtttctccttatcctccatgcctgctggtgtcttggacattggtatggctctagctagtgccaccgatgattcatacacaactttgtattctgaagttgacttcgctggtgtgtccaagatgttaactatggttccttggtactcctctagattggaacctgccttgaagtctttgaacggcgacgcttcttcctcggcagccccaagctcctctgcagctccaacctcttctgctgcaccatcttcctctgccgcgccaacttccagtgccgcatcctctagttcggaagctaagagctcttctgctgctccatcgtcctctgaagctaagtcttcttctgctgccccatcttcaagcgaggcaaaatcatcctctgcagctccctcttcctctgaagctaagagttcatccgctgccccatcctctactgaagccaagattacctcagccgctccatcttctactggtgctaagacctccgctatttctcaaattactgacggtcaaattcaagctactaaggccgtttctgaacaaacggagaacggtgctgctaaggcttttgttggaatgggtgctggtgtcgttgcggctgctgctatgttgttgtaa

SEQ ID NO: 4654 - DNA, 366 bp, Artificial Sequence
  Optimized genes for Saccharomyces cerevisiae
atggcccaaagagttacttttagaagaagaaacccatacaacactagatctaataagatcaaggttgtcaaaactccaggtggtatcttaagagctcagcacgtcaagaagttggctaccaggccaaaatgcggtgattgtggttccgccttgcaaggtatctccaccttgagacctcgtcaatatgctactgtgagtaagactcataagacagtttctagagcctacggtggctcaagatgtgctaactgtgttaaggaacgtattattagagcattcctaattgaagagcaaaagattgtaaagaaggtcgttaaggaacaaaccgaagctgctaagaagtctgaaaaaaaagctaagaaataa

SEQ ID NO: 4655 - DNA, 408 bp, Artificial Sequence
  Optimized genes for Saccharomyces cerevisiae
atgtctgacgctgttacaattagaactagaaaggttatttccaatccattactagctagaaagcaattcgttgtcgatgttctgcaccctaacagagcaaatgttagtaaggatgaacttagagagaaattggctgaagtatacaaggccgaaaaggacgctgtttccgtcttcggatttagaacccagtttggtggtggtaagtcagttggtttcggcttggtctacaactctgtggccgaagctaaaaagttcgaaccaacttatagattggtcagatacggtttggctgaaaaggtcgaaaaggcttctagacaacaaaggaaacaaaaaaagaacagagataagaagatcttcggtaccggtaaacgtttagccaagaaggttgctcgtcgtaacgccgactaa

SEQ ID NO: 4656 - DNA, 2304 bp, Artificial Sequence
  Optimized genes for Saccharomyces cerevisiae
atggttcaatcagctgtcctagggttccctagaatcggtccaaacagagaactaaagaaagccaccgagggttattggaacggtaagattactgttgatgaattgtttaaggtcggtaaagacttgagaacccagaactggaagttacaaaaggaggcgggtgttgatattataccatcaaacgatttctccttttatgaccaagttttagacttatccctgctgttcaacgttatccctgatagatatactaaatacgatttgtcccctattgatactttgttcgccatgggtcgtggccttcaaagaaaagctacagaaaccgaaaaggctgtggacgtaaccgctttggaaatggttaagtggttcgactctaattaccattacgtgcgtcctactttttctaagactacccaattcaagttgaatggtcaaaagccagtggatgagtttctagaagccaaggaattgggtattcatactagaccagtcttgttaggtccagtcagttacttgtttttgggtaaagctgacaaagacagtttggacttggaaccattgagtcttttggaacaactcttgccattgtacactgaaatcttgtccaagctagcctccgctggtgctacagaagtccaaattgatgaaccagtcctagtccttgatttgccagctaacgcccaagctgctattaaaaaggcttacacctacttcggtgaacaatctaacttgcctaagatcactttagccacttatttcggtacagtcgttccgaacttggatgccatcaagggtttgccagttgctgctttgcacgtcgacttcgttagagctcctgaacaatttgacgaagttgttgctgctattggtaataagcaaacattgagcgtgggaattgtcgacggtaggaacatctggaagaatgatttcaagaagtcctctgctattgttaacaaagctattgaaaaattgggtgctgacagagttgttgttgcaacttcgtcttcactattacataccccagtcgacttaaacaacgagaccaaacttgacgctgaaattaagggttttttttctttcgctactcaaaagttagacgaagtagttgtcataaccaagaacgtttctggtcaagacgttgcagcagccttagaagctaacgctaagtctgtcgaatcaagaggtaagtctaagtttatccacgacgccgccgttaaggctagagttgcttctatcgacgagaaaatgtctactcgcgccgctccattcgaacaaagattgcccgaacaacagaaggtcttcaacttgccactgtttcccactacgactattggttcctttccacaaactaaggatattagaattaacagaaataaattcaataagggtactattagcgctgaagaatatgaaaaattcattaactctgaaatcgaaaaggtcattagattccaagaagaaattggactcgacgtcttggtccacggcgagcctgaaagaaacgatatggttcaatactttggtgagcaaatcaatgggtacgcctttacagtgaacggttgggttcaatcatacggttctagatacgtacgtccaccaatcattgttggtgatttatctagaccaaaggccatgtctgtcaaagaatccgtttatgctcagagcattacgtccaagccagtaaagggtatgttgactggtccaatcacttgtttaagatggtctttcccaagagacgacgttgatcaaaaaacccaagcaatgcaactagctttggcattgcgtgatgaagttaacgatttagaagccgctggtatcaaggtcatccaggttgatgaaccagctttaagagaaggcttgccattgagagaaggcaccgagagatccgcctactacacctgggccgcagaagctttcagagtcgctacttccggtgttgcgaacaagactcaaatccactcccacttctgttactccgacttggacccaaaccacattaaggctttggatgctgatgttgtctctatcgaattctctaagaaggatgacgctaactacatcgctgaattcaagaattaccctaatcacatcggtttgggtttattcgatattcattccccaaggatcccaagtaaggatgaattcatcgccaagatttctaccattttgaaatcttatccagccgagaaattttgggtgaatccagattgcggtctgaaaactcgtggttgggaagaaaccagattgtcgttgacccatatggttgaagcagctaagtacttccgtgaacaatataagaactaa

SEQ ID NO: 4657 - DNA, 618 bp, Artificial Sequence
  Optimized genes for Saccharomyces cerevisiae
atgtctgatccatcatctatcaacggtggtatcgttgtcgccatgactggtaaggactgtgtcgccattgcttgcgacctgagactaggttctcaatccttgggagtttccaataagttcgaaaagatttttcattacggtcacgttttcttgggtatcaccgggttggctactgacgttaccaccttaaacgaaatgtttaggtacaaaactaatttatataaattgaaggaagagcgtgctattgaacctgaaacctttactcagttggtctccagctctttatatgaacgtagattcggtccatacttcgtgggtccagtagttgctggcataaactctaagagtggtaaaccattcattgctggtttcgacttgatcggctgtattgacgaagctaaggattttatcgtttcgggtacagcttctgatcaattgttcggtatgtgtgaatccctatacgagccaaacttggaaccagaagacttgttcgaaactatttctcaagctcttttgaacgcagccgatagagatgctttgtcaggttggggtgccgtcgtctacatcattaagaaggatgaagttgttaagagatacttaaaaatgagacaagattaa

SEQ ID NO: 4658 - DNA, 804 bp, Artificial Sequence
  Optimized genes for Saccharomyces cerevisiae
atgtccacttccagagaagactctgtctatttggccaaactagcagaacaggctgaaagatacgaagaaatggttgagaacatgaagactgttgcctcatctggtcaagaattgagtgttgaagaacgtaaccttttgtctgtggcttataagaacgtcattggtgctcgtagagcttcttggagaattgtctcctcaatcgaacagaaggaagagtctaaagagaagtctgaacatcaagttgagctcatttgttcctacagatcgaagattgagacagaattgaccaagatatccgatgatatcttgtcagttttagattctcacttgattccaagcgctaccactggtgaatccaaggtattctactacaaaatgaaaggcgactatcatagatatttagctgaattttcttctggtgacgctagagaaaaggctactaacgcttctttggaagcttacaagaccgcctctgaaatcgcaacaaccgaattacctccaactcacccaatcagattgggtttggccttgaatttttctgtcttctactacgaaatccaaaatagccctgacaaagcctgtcatttggccaagcaagcattcgacgacgctatcgcggaactagatactttatccgaagaaagttacaaggattccactttgattatgcaattgttgagggataacttaacgctgtggacctccgacatgtctgaatctggtcaagctgaagatcaacaacaacaacaacaacaccaacaacaacaaccaccagctgctgccgaaggtgaagctccaaagtaa

SEQ ID NO: 4659 - DNA, 330 bp, Artificial Sequence
  Optimized genes for Saccharomyces cerevisiae
atgtcagatgccggcagaaagggttttggtgagaaagctagtgaagctttgaagccagactcccaaaagagctatgccgaacagggtaaggaatacattaccgacaaggctgacaaggtcgcaggtaaggtgcaaccagaagataacaagggtgtcttccaaggagttcatgattccgctgaaaagggtaaggataatgctgagggtcaaggtgaatctttagccgaccaagctagagattacatgggtgctgctaaatctaaattgaacgacgccgttgaatacgtttctggtcgtgttcacggtgaagaagatcctactaagaaataa

SEQ ID NO: 4660 - DNA, 621 bp, Artificial Sequence
  Optimized genes for Saccharomyces cerevisiae
atgaactctgagtacgattatttgttcaagttgttgttgattggtaactcaggtgttggcaagtcttgtttacttttgagattctccgatgacacttacactaatgattacatttccactattggagttgactttaagattaagaccgttgaattggatggtaaaaccgtcaagttacaaatctgggacactgctggtcaagagagattccgtaccatcacttccagctactatagaggttctcacggtatcatcatagtctatgatgttactgatcaagaatctttcaatggtgtcaaaatgtggttacaagaaattgacagatacgcaacctccactgtattgaagttgctagtgggtaacaaatgtgatctaaaagacaagagagttgttgaatacgacgttgctaaggaatttgctgacgctaacaagatgccattcttggaaacatctgccctggattctaccaacgtcgaagacgcctttttgacgatggctagacaaatcaaggaaagtatgtctcaacaaaacttaaacgaaaccactcagaagaaagaagataagggtaatgtcaacttgaaggggcaatcgttgactaatacaggtggtggttgctgttaa

SEQ ID NO: 4661 - DNA, 1128 bp, Artificial Sequence
  Optimized genes for Saccharomyces cerevisiae
atggactctgaagtcgctgccctggttattgacaacggttctggtatgtgtaaggccggtttcgctggtgatgatgctccaagagcagtctttccatctattgttggtagaccaagacaccaaggtatcatggttggtatgggtcaaaaggactcctatgttggtgacgaagctcaaagtaagagaggtattttgactttaagatatcctattgaacacggcatcgttaccaactgggacgatatggaaaagatttggcatcacactttctataatgaactacgtgtcgctccggaggaacaccctgttttgcttactgaagccccaatgaacccaaagtccaacagggagaagatgacccagattatgttcgaaactttcaatgttcctgctttctacgtgagcatccaagctgttctctccttatatagttctggtagaaccactggtatcgttctagatagcggcgatggtgtcacccatgtcgtccctatctacgccggtttttctttaccacatgctattctacgtatcgacttggccggaagagatttaaccgattacttgatgaaaatattgtcagaaagaggttactctttctccactactgccgaaagagaaatcgttagagatatcaaagaaaagttgtgttacgtcgctttggacttcgaacaagaaatgcaaacagcggcacaatcatcttcaattgaaaagtcttacgaattgccagatgggcaggtaattaccattggtaacgaaagattccgtgctccagaagctttgtttcacccatccgtgcttggtttggaatctgctggtatcgaccaaacaacttacaattctattatgaagtgcgacgttgatgttagaaaggaattgtacggtaacatcgtaatgtcgggtggaaccactatgtttccaggtattgcagaaagaatgcaaaaggagatcaccgctttggctccctcttctatgaaagtcaagatcattgctccaccagaaagaaaatactctgtttggattggtggctccatcttggcctccttaacgactttccaacaaatgtggatttccaaacaagagtacgacgaatctggtccatccattgtccatcacaagtgtttttaa

SEQ ID NO: 4662 - DNA, 765 bp, Artificial Sequence
  Optimized genes for Saccharomyces cerevisiae
atgtctatagctgaatttgcatacaaggaaaagcctgaaactcttgttctattcgacgtcgacggtacattgactccagctcgtttgaccgtctccgaagaggtcagaaagaccctggctaaattaagaaataagtgttgtattggattcgttggtggttcggatttatctaaacaattggaacaattgggtccaaacgttttggatgaattcgactactcattcagcgaaaacggtttgaccgcttacagattgggtaaggaattggcctcccaatctttcattaactggttgggtgaagagaagtacaacaagttggctgtttttattttgagatatttgtccgaaatcgacttgccaaaaagaagaggtactttccttgaattccgtaacggtatgatcaacgtgagtccaattggtaggaacgcttctaccgaagaaagaaacgaattcgagagatatgataaggaacaccaaatcagagccaagttcgtcgaagctctaaagaaagaatttccagactacggcttaacattctctattggtggtcaaatttcttttgatgtattcccagccggttgggacaagacttattgcttacaacatgttgaaaaggatggctttaaggaaattcatttctttggtgacaagactatggttggtggtaatgattacgaaatcttcgtcgatgagagaaccatcgggcactccgttcagtctcctgatgacactgttaaaatcttgacggaactctttaatctataa

SEQ ID NO: 4663 - DNA, 765 bp, Artificial Sequence
  Optimized genes for Saccharomyces cerevisiae
atgggtagagttatcagaaaccaacgtaagggtgccggttctatttttacttctcatactcgtttgagacagggtgctgctaaactaagaacccttgactacgccgaaagacatggttacattagaggtattgtcaagcaaatcgtccacgactctggtagaggtgctccattggctaaggtcgtcttccgtgacccatacaaatacaggttgcgtgaggaaatcttcatcgctaacgaaggtgtccacactggacaattcatttatgcgggtaagaaggcttctttaaacgttggtaacgtgttaccattgggtagcgttccagaaggtaccatcgtgtcgaacgtagaagaaaagcccggtgacagaggggccttggccagagcctccggtaactacgttataatcattggtcacaatcctgatgaaaacaaaactagagtcagactgccatctggcgcaaagaaagttatcagttcagatgcaagaggtgtcattggtgttattgctggtggcggtagagttgataagcctttgttaaaggctggccgtgcttttcacaagtatagattgaagagaaattcttggccaaagaccagaggtgttgccatgaatccagttgatcacccacatggtggtggtaaccaccaacatattggtaaggcttccactatttccagaggtgctgtttccggacaaaaggctggtctaatcgctgctagaagaaccggtttgttgaggggttctcaaaaaacacaagattaa

SEQ ID NO: 4664 - DNA, 180 bp, Artificial Sequence
  Optimized genes for Saccharomyces cerevisiae
atggcaaaatccaagaaccatactgctcataatcaaaccagaaaggcccacagaaacggtattaagaagccaaaaacttataagtacccttctttgaaaggtgttgatccaaagttccgtagaaaccataaacacgctttgcacggtacagctaaggctttagctgccgctaagaagtaa

SEQ ID NO: 4665 - DNA, 1458 bp, Artificial Sequence
  Optimized genes for Saccharomyces cerevisiae
atggttcatttaggtccaaaaaagccacaagctagaaagggtagcatggctgacgttccaaaagaattgatggatgaaattcatcaattggaagacatgtttactgttgattctgaaaccttaaggaaagtggttaagcatttcattgatgaattgaacaaggggttgactaaaaaaggtggtaatattccaatgatcccagggtgggttatggagttccctactggtaaggaatctggtaattacttagccattgatttgggcggtaccaacttgagagtcgtcctagtcaagctctctggtaaccacactttcgatactactcaatccaagtacaagctgccacatgacatgagaacaaccaaacaccaagaagaattgtggtcattcatcgctgactccttgaaagatttcatggtggaacaagaattgttgaatacaaaggataccttgccattgggtttcactttctcttacccggccagccagaacaagatcaacgaaggcatcttacaaagatggactaaaggtttcgacattccaaatgtagaaggtcacgatgtcgtccctttattgcaaaacgaaattagtaagagagagttgccaatcgaaatcgttgctttgattaacgacaccgttggtacgttgattgcttcctactacacagatccagaaactaagatgggtgtcatctttggtacaggtgttaacggtgctttttatgatgtcgtctctgacattgagaaattggaaggtaagttggccgatgacattccatctaactctccaatggctatcaattgtgaatacggatcgttcgataacgaacacctagtccttccaagaaccaagtacgatgttgcagtcgatgaacaatctcccagaccaggtcaacaagctttcgaaaaaatgacttccggttattatcttggtgaattgttgagattagttttattggaattgaacgagaagggtctaatgttaaaggaccaagatttgtccaagttgaagcagccatacatcatggatacctcttacccagctagaatcgaagacgacccatttgaaaacctagaagacaccgacgacatctttcaaaaggactttggtgtaaagactactttgcctgaacgtaagttgattagaagattatgcgaactaattggtaccagagccgctcgtctggctgtttgtggtattgccgctatttgtcaaaagagaggttataagaccggtcacatcgctgctgatggctctgtttacaacaagtatccaggtttcaaggaagctgccgcaaagggtttgcgtgacatctacggatggactggtgacgcctccaaggaccctattactattgttcctgcagaagatggtagtggtgctggtgctgcggttatagctgccctgtcagagaaaagaatcgctgagggtaagtccttaggcattataggtgcctaa

SEQ ID NO: 4666 - DNA, 2757 bp, Artificial Sequence
  Optimized genes for Saccharomyces cerevisiae
atgaccgatacatcctcatcttccagttcttcttctgcttcttccgtctccgctcaccaaccaacgcaggaaaaacctgccaagacttacgatgatgccgcttctgaaagttccgatgacgacgacattgatgctttgattgaagaactacaatccaaccacggtgttgacgacgaagattccgataacgatggtccagttgccgctggtgaggctagaccagttccagaagaatatttgcagaccgacccttcctacggtttgacctctgatgaagttttaaagcgtagaaagaagtacgggttgaaccaaatggctgacgaaaaggagtccttggtcgttaaattcgttatgttcttcgttggaccaatccaatttgttatggaagctgctgctatcttggctgctggtttgtctgattgggtggattttggtgtcatttgtggtttgttaatgctaaacgccggtgttggtttcgttcaagaattccaagctggttcaattgtcgacgaacttaagaagactttggctaacaccgcagttgttattagggacggtcagttggttgagatcccagctaacgaagttgttccaggtgatattttgcaactagaagacgggactgtaatcccaaccgacggaagaattgttactgaagattgtttcttacaaatcgatcaatccgctattactggtgaatccttagctgtcgataagcattatggtgaccaaactttctcttcttctactgtaaaaagaggcgaaggttttatggttgttaccgccactggtgataatacattcgtcggtcgtgccgctgctctagttaacaaagctgctggtggtcaaggtcacttcactgaagttttgaatggtatcggtataattttgttggttctagtcattgctactttattgttggtttggactgcttgcttctacagaaccaatggcatcgttcgcatcttgagatacactctcggtatcactattatcggtgtgccagtcggcttaccagctgtcgtcaccactactatggccgtaggtgctgcttacttggccaagaagcaagctatcgttcaaaagttatcagccattgagagcttggctggagttgaaattctctgttcggacaaaactggtacgttgaccaagaacaagttgtcattacatgaaccatacaccgtggaaggtgtatctcctgatgatcttatgttgactgcctgtttggccgcttccagaaagaagaagggtttggacgctatagacaaggcattcttgaagtccctgaagcaatatccaaaggcaaaggacgctttgactaaatacaaggtccttgaattccatccatttgacccagtgtcaaagaaagttaccgctgtcgtggaatcccccgaaggtgaaagaattgtctgtgtcaagggtgctcctctattcgtattgaaaaccgttgaagaggatcacccaatcccagaggatgtccacgagaactatgaaaataaggtcgccgagttagcatcgagaggtttcagagccttgggtgttgccagaaaaagaggtgaaggtcattgggaaatcttaggtgttatgccgtgtatggatccacctagagacgataccgcccaaactgtttctgaggctagacacttaggtctgagagtgaagatgttgaccggtgacgccgtcggtattgccaaggaaacttgtcgtcaattaggtttgggcaccaatatctacaacgctgaaagactaggtttgggtggtggtggtgacatgcccggttccgaactagccgactttgtcgaaaacgctgatggttttgccgaagtcttcccacaacataagtacagagtggttgaaattttgcaaaatagaggttatttggtcgcgatgaccggggatggtgtcaacgacgcaccatctttaaaaaaagctgacactggcatcgcagtcgaaggtgctacagacgcagctaggtctgctgccgacattgtttttctggctccaggtctttctgctatcattgacgcccttaaaacttctcgtcaaatcttccacagaatgtactcttatgtagtctaccgtattgctttatctttgcacttggaaattttcttgggtttgtggattgctatcttggataacagcttggatattgatttgatcgtctttatcgccatcttcgccgatgtcgcaactttggcaatcgcatacgacaacgctccttacagcccaaagcctgttaagtggaacttgccacgtctgtggggtatgtctatcatcttaggtattgttttagctatcggcagctggatcactttgacaacgatgttcttgccaaagggtggtattattcagaacttcggagctatgaacggtattatgtttctgcaaatttctttgactgaaaattggttgatttttattacaagagctgctggtccattctggtcaagtatcccttcttggcaattggcgggagctgtgtttgctgttgacattattgccacaatgttcactttatttggctggtggtccgaaaattggaccgatattgttactgtcgttagagtctggatctggtcgattggtatattctgcgttctaggtggcttttattacgaaatgtccaccagtgaagcttttgatagattgatgaacggtaaaccaatgaaggaaaagaaatctaccagatctgttgaagacttcatggccgcgatgcaaagagtctctacacaacatgaaaaggaaacctaa

SEQ ID NO: 4667 - DNA, 318 bp, Artificial Sequence
  Optimized genes for Saccharomyces cerevisiae
atggctccagtgaagagtcaagaatctattaaccagaagttagccttggttatcaaatccggtaagtataccttgggttataagtccaccgttaaatccctgcgtcaaggtaagagcaagttaattattatcgctgccaacactccagtcttgagaaagtctgaattagaatactacgctatgttgtctaagactaaggtctactacttccaaggtggaaataacgaattgggtacagctgttggcaaactttttagagttggtgtagtctcaattttggaggctggtgactctgatatcttgaccactctagcataa

SEQ ID NO: 4668 - DNA, 468 bp, Artificial Sequence
  Optimized genes for Saccharomyces cerevisiae
atgaaggtcgagatcgattctttcagtggtgcaaagatctacccaggtagaggtaccttattcgtcagaggtgactctaagattttcaggtttcaaaactccaaatctgcgtctttgttcaagcaaagaaagaacccaagaagaattgcttggactgttttgtttagaaagcatcacaaaaaaggcatcactgaagaagttgccaagaaaagatccagaaagacagtgaaggctcaacgtcctattaccggtgcctcattggatctaattaaggaaagaagatccttgaaaccagaagttagaaaagctaatcgtgaagagaagttgaaagctaacaaagaaaagaagaaggctgaaaaggctgctcgtaaggccgaaaaggctaaatctgctggtacccaaagctccaagttttctaagcagcaagccaagggtgctttccaaaaggttgcagctacttcgagataa

SEQ ID NO: 4669 - DNA, 651 bp, Artificial Sequence
  Optimized genes for Saccharomyces cerevisiae
atgaaaaccttaattgtcgtcgacatgcaaaacgatttcatctcgccactgggttctttgactgttccaaagggtgaagaattgattaacccaatttctgatttgatgcaagacgctgatagagattggcatcgtattgttgttactagagactggcacccttccagacacatatcctttgccaagaatcacaaggataaggagccatactcaacttacacataccattccccaagacctggtgacgactctactcaagagggcattttgtggccagttcactgtgttaagaacacctggggttctcaacttgtggatcagatcatggaccaagttgtcaccaagcatatcaagatcgtcgataagggtttcttgactgacagagaatactacagtgcctttcacgacatctggaatttccacaaaaccgacatgaacaagtatttggaaaaacatcatactgatgaagtatatattgtcggtgttgctttggaatattgtgtcaaggcaacagctattagcgctgctgaattaggttacaagaccactgttctattggattacacgagaccaatctctgacgatcccgaagtgattaataaggttaaagaagaattaaaggctcacaacatcaacgtcgttgataaataa

SEQ ID NO: 4670 - DNA, 1533 bp, Artificial Sequence
  Optimized genes for Saccharomyces cerevisiae
atgcctacatctggtactaccattgaattaattgatgatcaatttccaaaggacgattctgcatcttcaggtatcgttgatgaagttgaccttactgaagctaacatcttggctaccggtttgaacaagaaggctccaagaattgttaacggcttcggttctttgatgggttctaaggaaatggtttctgttgaattcgacaagaagggtaacgaaaaaaagtctaacttggacagattactagaaaaggataatcaagagaaggaggaagctaagaccaagattcacatctccgaacaaccctggactttgaacaactggcaccaacacctaaattggttgaacatggtgctggtttgtggtatgccaatgattggttggtactttgcactatctggtaaggtccctttgcacttgaacgttttcttatttagtgttttctactacgcagtaggtggtgtttccattactgccggctaccacagactgtggtctcatagaagctactccgctcactggccattgagattgttctacgctatcttcggatgtgcttctgtcgaaggttctgctaagtggtggggacattcgcatagaatccaccacagatatactgatactttgagagacccatacgacgctagaagaggtttgtggtactcccacatgggttggatgttattgaaaccaaacccaaagtataaggcgcgtgctgacatcactgacatgaccgacgattggactattagattccaacatagacactatattctattgatgcttttgactgctttcgtcattcctaccctcatctgcggttacttctttaacgactatatgggcggtcttatctatgccggttttatcagagtcttcgtcattcaacaagctaccttttgtattaattctttggctcattacatcggtacacagccattcgatgacagaagaacccctcgtgacaattggattacagctattgttacatttggtgaaggttaccataacttccatcatgaattcccgaccgattaccgtaatgccattaaatggtatcagtacgatccaactaaagtaataatttacttgacgtccttggttgggttagcttatgatttaaagaagttttctcaaaacgctatcgaggaagctttgatccaacaagaacaaaagaaaatcaacaagaagaaggccaaaattaattggggtccagtcttaactgatttgccaatgtgggataaacaaaccttcttggctaaaagcaaagaaaacaaaggcttagtcatcatttcaggtattgtccacgacgtgtcaggttacatctccgaacatccaggtggtgaaactttgattaagactgccttgggtaaggatgccaccaaggctttcagtggtggtgtctaccgtcactccaacgccgctcaaaatgttttggccgacatgagagttgccgttattaaggagtctaagaactccgcaatcagaatggcctccaaaaggggtgaaatatatgaaactggtaagttcttttaa

SEQ ID NO: 4671 - DNA, 735 bp, Artificial Sequence
  Optimized genes for Saccharomyces cerevisiae
atggctgctgagaagattttgactccagaatcgcaattgaagaagagtaaagcccaacaaaagactgctgaacaagtcgccgctgaaagagcagccagaaaggctgctaacaaggaaaaaagggctatcattttggaaagaaacgctgcctaccagaaagagtatgaaactgccgaacgtaacatcattcaagctaagagagacgccaaggctgctggttcttactacgttgaagcccaacataagttggtcttcgtcgtcagaattaagggtattaataagatcccacccaagcctagaaaagttttgcaattactgagattgactagaattaattccggtacattcgtaaaggttaccaaagcaactttggaattacttaagttgattgaaccatacgttgcatatggttacccatcttactctaccattcgtcagttggtctataagagagggttcggcaaaatcaacaagcaaagagtgccattgtccgataatgctatcatcgaagctaacctaggtaagtacggtatcttgtctatagatgacttgatccacgaaatcattaccgttggtccacactttaagcaagctaataacttcttatggcctttcaaattatctaacccatcaggtggttggggtgttccacgtaagtttaaacattttattcaaggtggttcctttggaaacagagaggaattcattaacaagctagttaagagcatgaactaa

SEQ ID NO: 4672 - DNA, 450 bp, Artificial Sequence
  Optimized genes for Saccharomyces cerevisiae
atgccatctagatttactaaaaccagaaagcacagaggccatgtatccgctggtaaaggtcgtattggcaagcacagaaaacatccaggaggtagaggtatggcaggtgggcagcaccaccataggatcaacatggacaagtaccacccaggttattttggtaaggtgggtatgagatatttccataagcaacaagctcacttctggaaacctgttctgaatttggataaattatggactcttattccagaagacaagagagatcaatacttgaagtctgcttctaaggaaacagctcctgttatcgataccttggccgctggttacggtaagattttgggtaagggtcgtattccaaacgttccagtcatcgtcaaggccagattcgtttctaagttggctgaagagaagatcagagccgctggtggtgttgtcgaactaattgcttaa

SEQ ID NO: 4673 - DNA, 765 bp, Artificial Sequence
  Optimized genes for Saccharomyces cerevisiae
atgtccgccccagaggctcaacaacaaaaacgtggtggttttggtggcagaaatagagggcgtccaaacagaagaggtccaagaaacaccgaagaaaagggatgggttccagtcaccaagttaggtagattggtgaaggctggtaagataactaccattgaagagatctttctgcattctttgccagtgaaagaattccaaattattgacaccttgttgccaggtctacaagatgaagttatgaacattaagcctgttcagaagcaaactagagccggtcaaagaacgagattcaaggctgttgtcgtcgttggagactctaatggtcacgtcggtttgggtattaagacagctaaggaagttgctggtgctattagagctggtatcatcattgctaaattgtccgtcattcccatcagaagaggttactggggtaccaacttgggtcagcctcacagcttagcaacaaaaactaccggtaagtgtggttcagttactgttagattgattccagccccaagaggttcgggtatcgtcgcttctccagccgttaaaaagcttttacaattggccggtgtcgaagatgtttacacccaatccaacggtaaaactaggactttggaaaatactttgaaggctgcgttcgttgcaatcggcaacacttacggcttcttgactccaaacttatgggctgaacaacctttgccagtatctccactagatatctatagtgacgaagcttctgcccaaaagaagcgtttctaa

SEQ ID NO: 4674 - DNA, 1131 bp, Artificial Sequence
  Optimized genes for Saccharomyces cerevisiae
atgtctaccttcggaaagttgttcagagtcacaacctacggtgaatctcattgtaaaagcgttggttgcatcgttgacggtgttccgccaggcatgtctttaactgaagccgatatccaaccacaattgacgagacgtagaccaggacaaagtaagctatctactccaagggatgaaaaggacagagttgaaattcaatctggtaccgagtttggtaagactttaggtacacctattgctatgatgattaagaatgaagatcagagaccacacgactattctgacatggacaaattcccaagaccttctcacgccgattttacttactcagagaagtatggtattaaagcctcgtccggtgggggtagagctagcgctagagaaaccatcggtcgtgttgcttccggtgctatcgcggaaaagttccttgctcaaaactctaacgtcgaaattgtcgccttcgttacccaaattggtgagattaagatgaacagagattctttcgacccagaatttcaacatctactgaacaccatcacccgtgaaaaagttgactccatgggtccaattagatgtccagacgcttctgttgctggtttgatggttaaggaaatcgaaaaatacagaggtaacaaggattccattggtggcgtggtaacttgtgtggtccgtaatttaccaactggtttaggtgaaccatgtttcgataagttggaagctatgttggcacacgcaatgttgtctattcctgcctcaaaaggttttgaaatcggttccggttttcagggtgtttccgtccccggctctaagcacaacgatccattctacttcgaaaaggaaacaaacagattgagaactaagactaataactcaggtggtgtccaaggtggcatctccaacggtgaaaatatttacttctccgtaccttttaagagtgtcgctactatttcccaagagcaaaaaactgccacctacgacggtgaagaaggtatcttggctgctaagggtagacacgacccagctgttactccaagagctataccaattgttgaagccatgaccgctttggtcttggccgatgcattgttgatccaaaaggctagagatttctctagatctgttgtccattaa

SEQ ID NO: 4675 - DNA, 360 bp, Artificial Sequence
  Optimized genes for Saccharomyces cerevisiae
atgccaaagaagagggcttccaacggtagaaacaagaaaggtcgtggtcatgtcaagccagttagatgtgttaattgcagtaagagcatccctaaggacaaggctatcaaaagaatggccattagaaatattgtcgaagctgctgcggtacgtgatttgtcagaggcatccgtttatccagaatacgccttgccaaagacttacaacaaattacactactgtgtctcttgtgctattcacgccagaatcgttagagttagatctagagaagatagaaagaacagagctcccccacaaagacctcgtttcaacagagaaaacaaggtgtctccagcagacgctgctaagaaagctttgtaa

SEQ ID NO: 4676 - DNA, 612 bp, Artificial Sequence
  Optimized genes for Saccharomyces cerevisiae
atggcctcattcgctaccaagttcgtcatcgcttgtttcttgttcttctctgcctctgctcataacgttttgttaccagcatacggaagaagatgttttttcgaagacttgtccaagggtgacgaattgtcaattagttttcaattcggtgatagaaatccacaatcctcttctcaattgacaggtgattttataatctatggtcctgagagacatgaggttttgaaaactgtgagagacacttcccacggtgaaattaccttgtctgctccatacaagggtcacttccaatactgcttcttaaacgaaaataccggtatcgaaaccaaggatgtaactttcaacattcatggcgttgtttacgtcgacttggacgatccaaacaccaacactttagacagcgccgtcaggaaattgtccaagctaactagagaagtcaaggatgaacaatcttacattgttatcagagaacgtacacaccgtaacactgctgaatccacgaacgatagagttaaatggtggtcgatcttccaacttggtgttgtcattgctaattctctatttcagatttattacctgagaagattttttgaagttacttctttggtttaa

SEQ ID NO: 4677 - DNA, 264 bp, Artificial Sequence
  Optimized genes for Saccharomyces cerevisiae
atggtttctcaattgtttgaagagaaggctaaggctgtcaatgaactgccaaccaaaccatccactgatgaattgttggagctttacgccttatataaacaggctactgttggtgacaacgataaggaaaagcctggtattttcaacatgaaggacagatacaaatgggaagcatgggaaaacttgaagggtaagtctcaagaagacgctgaaaaggaatacatcgctttggttgatcaactaattgccaagtattcttcttaa

SEQ ID NO: 4678 - DNA, 930 bp, Artificial Sequence
  Optimized genes for Saccharomyces cerevisiae
atgtctgccgtttttaataacgctactttatctgggttggttcaagcttctacttactctcaaactttacaaaacgttgctcattatcaaccacagttaaacttcatggagaagtactgggccgcttggtactcttatatgaacaacgacgttcttgctaccggcctcatgttctttttattgcacgaatttatgtactttttcagatgtttgccatggttcattatcgatcaaattccatacttcagaagatggaagttgcaaccaaccaaaattccaagcgctaaagaacagttgtattgtttgaaatccgtcttgttatctcattttttggtcgaagccatcccaatttggactttccatccaatgtgtgaaaagttaggtatcaccgtcgaagttccatttccatcgttgaaaaccatggctttggaaattggtttattttttgtattggaagacacatggcattattgggctcacagattgttccactacggtgttttctacaagtacatacataagcaacatcacaggtatgcggctcccttcggtttgtccgccgaatacgctcatcctgctgaaactctatccttgggtttcggtaccgtcggtatgcctattttgtacgtcatgtacactggtaagctacacctattcactttgtgtgtttggatcacgcttagactgttccaagctgtggatagtcactccggttacgatttcccttggtccctgaataagatcatgccattctgggccggtgcagagcaccacgatttgcatcaccactacttcattggtaattatgcctcttcttttagatggtgggactactgcttggacactgagtcaggaccagaagcaaaggcttcaagagaagaacgtatgaagaagcgtgctgaaaacaacgcccaaaagaaaaccaactaa

SEQ ID NO: 4679 - DNA, 525 bp, Artificial Sequence
  Optimized genes for Saccharomyces cerevisiae
atgtctaccaaggctcaaaatccaatgagagacttaaagatcgaaaagttagttttgaacatctctgttggagaatctggtgacagattgactagagcttctaaggtcttggaacaacttagtggtcaaacaccagttcagtccaaggctagatacacagtaagaacgtttggtatcagacgtaacgaaaaaattgctgttcatgtcactgttcgtggtcctaaggccgaagaaattctagaaagaggtttgaaggtgaaggaatatcaattgcgtgacagaaacttttccgcaactgggaacttcggttttggtattgatgagcacattgacttgggtattaaatacgatccatccatcggtattttcggtatggatttctatgttgttatgaacagaccaggtgctagggtcaccagaagaaagagatgtaaaggtactgtcggcaatagccacaaaaccactaaggaggatactgtttcatggttcaagcaaaagtacgacgccgatgtcctggataaataa

SEQ ID NO: 4680 - DNA, 438 bp, Artificial Sequence
  Optimized genes for Saccharomyces cerevisiae
atgggtaaggggaagccaagaggtttaaactccgctagaaagttgcgtgttcatagacgtaacaatagatgggctgaaaataactacaagaaaagattgctgggcaccgctttcaagagctctccattcggtggttcttcccacgctaagggtatcgttttagaaaaattaggtattgaatccaaacaacctaactctgcaattaggaagtgtgtcagagttcaattgatcaagaatggtaagaaagtcactgcctttgtgccaaacgatggttgtttgaacttcgtcgacgaaaacgacgaagttctacttgccggtttcggtagaaagggcaaggctaagggagatattccaggtgttagatttaaggtagtcaaggttagtggtgtttcattgttggctttgtggaaagagaagaaggaaaaaccaagatcttaa

SEQ ID NO: 4681 - DNA, 468 bp, Artificial Sequence
  Optimized genes for Saccharomyces cerevisiae
atgaaggttgaagttgattctttcagcggtgctaagatctacccaggtcgtggtactttgttcgttagaggtgactccaagattttcagatttcaaaactctaagtctgcctctttgttcaaacaaagaaagaatccaagaagaatcgcttggactgtgttgtttagaaagcaccataagaagggtattaccgaagaagtagcaaagaagcgttctagaaaaacagtcaaagctcaaagaccaattaccggagcctccttagatttgatcaaggaaagaagatccttgaaacctgaggttagaaaggcaaaccgtgaagaaaaactaaaagctaacaaggagaagaagagagccgaaaaggctgctagaaaggctgaaaaagctaaatcagcgggtgtccagggttcgaaggttagtaagcaacaagctaagggcgccttccaaaaggtcgctgccacttccaggtaa

SEQ ID NO: 4682 - DNA, 1038 bp, Artificial Sequence
  Optimized genes for Saccharomyces cerevisiae
atggaagcccataaccaatttttgaaaaccttccaaaaggaacgtcacgacatgaaggaagccgaaaaagatgagatccttctaatggaaaactcgagacgtttcgttatgttcccaattaagtaccacgaaatttgggccgcttacaagaaagtcgaagcttctttttggactgccgaagaaattgaattggctaaggacactgaggatttccaaaaattgacagacgaccaaaaaacttacatcggtaacctattggcgttatccatcagttccgacaacttggtcaacaagtacttgatcgagaatttttctgctcaattgcagaacccagaaggtaagtccttttacggtttccaaattatgatggaaaacatttattctgaagtctacagcatgatggttgatgctttctttaaggacccaaagaacatccctttatttaaagagatcgccaacttaccagaggtaaaacataaggctgccttcattgaaagatggatttctaacgatgactcattatacgctgaaaggttggttgctttcgccgctaaggaaggtattttccaagctggtaattatgcttctatgttctggttgactgataagaagatcatgccaggtctggctatggccaatagaaatatttgtagagacagaggtgcatataccgacttctcttgtttgttgtttgcacatctcagaactaagccaaatccaaagatcattgaaaagattataaccgaagcagttgaaatcgaaaaggaatactattccaactcattgcccgtggaaaaatttggtatggacttgaagagtatccacacttatattgaatttgttgctgatggtttattgcaaggtttcggaaacgaaaagtactacaatgctgtcaaccctttcgaattcatggaagatgttgctaccgctggcaagacaacgttcttcgaaaagaaagtttctgattaccaaaaggcttctgatatgtctaagtccgctaccccatccaaggaaattaactttgatgatgacttctaa

SEQ ID NO: 4683 - DNA, 201 bp, Artificial Sequence
  Optimized genes for Saccharomyces cerevisiae
atgtctttctcttccttgtataagacctttttcaaaagaaacgctgttttcgttggtactatttttgcaggtgccttcgttttccaaactgtctttgatacagctattacctcttggtacgaaaatcacaacaagggtaaattgtggaaggacgtcaaggccagaatcgctgctggtgatggtgatgacgacgatgaataa

SEQ ID NO: 4684 - DNA, 999 bp, Artificial Sequence
  Optimized genes for Saccharomyces cerevisiae
atggttcgtgttgctatcaatggtttcggtagaatcggtagattagtgatgagaatagccttgtctagacccaatgttgaagtggttgccttgaacgatccattcattactaacgactatgctgcttacatgtttaagtacgattccacgcacggtagatacgccggcgaagtatcccatgatgataaacacattatcgtcgatggtaagaagatcgctacctaccaagagagagaccctgctaacttaccatggggttcatctaacgttgacatcgctattgattctaccggtgtcttcaaggaattggatactgctcagaagcatatcgacgccggcgctaagaaggttgtcattactgctccatcatctaccgccccaatgtttgtcatgggagttaatgaagaaaagtatacttcggaccttaaaattgtcagtaacgcttcctgtacaacaaactgtttggcacctttggctaaggttattaacgacgcttttggtattgaagaaggtttgatgaccacagttcattccctgaccgccactcaaaagactgttgacgggccatctcacaaggactggagaggtggtagaactgcatctggtaacattattccatcatctaccggcgctgcgaaggccgtaggaaaggtcttgcctgaactacaaggtaaattgactggtatggctttcagggtcccaactgttgacgttagcgtggttgatttgaccgtaaagttgaacaaggagaccacctacgatgaaatcaagaaagtcgtcaaggcagctgctgaaggtaaattgaagggtgtcttaggttacactgaagatgctgttgtttcctctgacttcttgggtgattctcactccagtattttcgatgccagcgccggtatccaattatctccaaaatttgtcaaactagtctcctggtatgacaatgaatacggttactctactcgtgtcgttgacttggttgaacacgttgctaaagcttaa

SEQ ID NO: 4685 - DNA, 2841 bp, Artificial Sequence
  Optimized genes for Saccharomyces cerevisiae
atggctggtcaagtgttggatggtaaggcctgtgcccagcaattccgttccaacatcgctaacgaaattaagagcattcaaggtcacgtcccaggtttcgcacctaacctagctattattcaagtcggtaaccgtccagattctgccacctacgttagaatgaagcgtaaggccgctgaagaagctgggattgttgcaaattttatccatttggacgagtctgctactgaattcgaagtcttaagatatgttgatcaattaaatgaagatccacacacccacggtattattgtccaactgcctttgccagcgcatttggatgaagacagaattaccagtagagtcttggctgaaaaggacgtcgatggtttcggcccaacaaatataggtgaattgaacaagaagaacggccacccatttttcttaccatgtactcctaagggtatcatcgaattgttgcacaaggctaatgtcacaatcgaaggttcccgttctgttgtcatcggtagatccgatatcgttggttctccagtcgccgaactattgaaatctttaaacagcactgttactatcacccactcaaagacgagagacattgcatcttacttgcacgatgccgacattgttgtggttgccattggtcaaccagaattcgtaaaaggtgaatggttcaagccaagagatggtacttcatccgataaaaagactgtagttatcgatgttggtacaaactatgtcgctgacccctccaagaagtctggtttcaagtgcgtcggtgacgttgaatttaacgaagccatcaagtacgtccatttgattaccccagttccaggtggtgtgggtccaatgactgttgcaatgttgatgcagaataccttgatagctgccaaaagacaaatggaggagtcctccaagccactacagatcccacccttgcctttgaagctcttgactcctgtcccatctgacattgacatctccagagctcaacaaccaaaattgattaaccaattggcccaagagctaggtatctatagtcatgaactagaactatacggtcattacaaggccaagatttcaccaaaggtcattgaaagacttcaaacaagacaaaacggtaagtacatcttggtaagcggtattacccctaccccattaggcgaaggtaagtctacaactactatgggattggttcaagctttaactgctcatctaggtaagcctgctatcgctaacgttagacaaccttccttgggtccaaccttgggagttaaagggggtgctgcaggtggtggttactctcaagttatcccaatggatgaattcaacttgcacttgaccggggacatccatgctatcggtgctgctaacaacttgcttgctgccgctatcgacactagaatgtttcacgaaactacccagaagaacgatgctactttttataacagattggttccaagaaagaacggtaaaaggaagttcactccatctatgcaacggagattgaataggttgggtattcaaaagactaatcctgatgacttaactccagaagagatcaataagttcgctagattgaatatcgacccagacaccattaccatcaaaagagtggtcgacattaacgacagaatgctgagacaaattaccattggtcaagcgccaactgaaaagaaccacactagagttactggcttcgatattacagttgcctctgaattaatggccattttggccttatctaaagacctgcgcgacatgaaggagcgtatcggtagagtcgttgttgcagctgatgtcaaccgtagtcctgttacagttgaagacgttggttgtaccggtgctttgaccgccttgttacgtgacgctattaaaccaaatttgatgcaaacgttagaaggtacccccgttttggtccacgccggtccattcgcaaatatttccattggtgcttcttcagttattgctgatagagttgctttgaagttggtcggtaccgaaccggaggccaagactgaagctggttatgttgttactgaagctggttttgacttcactatgggtggtgaaagattctttaatataaagtgcagatcctccggtctaaccccaaacgcagttgttttggtcgctaccgttcgtgctttaaagtctcatggtggtgctccagacgtcaaaccaggccagccattgccatctgcttatactgaagaaaacatcgaatttgttgaaaagggcgctgctaacatgtgtaagcaaatcgctaacattaaacaatttggagtcccagttgttgtcgccattaacaaattcgaaactgataccgaaggtgaaattgctgctattaggaaagctgcccttgaagctggtgctttcgaagcagtcacgagtaaccactgggctgaaggtggtaagggtgctatcgatttggccaaggccgttattgaggcttctaaccaacctgttgactttcatttcctttacgatgtgaactcttctgtagaggataaactgactacaatcgtgcaaaagatgtacggtggtgctgccatcgacatcttgccagaagcgcaaagaaagatcgatatgtataaagaacaaggattcggcaatttaccgatttgtattgccaaaactcaatactccttatcgcatgacgccactttgaagggtgtaccaaccggctttactttcccaataagagatgtcagattgtcgaacggtgctggttacttatacgctcttgcagctgaaattcaaaccatcccaggtttggctacttacgctggttacatggctgtggaagtcgacgatgatggtgaaattgatggactcttctaa

SEQ ID NO: 4686 - DNA, 759 bp, Artificial Sequence
  Optimized genes for Saccharomyces cerevisiae
atgtccctaccagctaccttcgacttgaccccagaagatgcccaattattattggccgctaacactcatttaggtgcccgtaacgttcaagtgcaccaagaaccatacgttttcaatgctagacctgatggtgtccatgtcataaacgttggtaagacttgggagaaattggttttagctgccagaattatcgctgccatcccaaacccagaagacgtggttgctatcagcagtcgtacttttggtcaaagagctgttttgaagttcgcggctcacactggtgctactccaatcgccggtcgttttactcccggttcgttcaccaactatattactagatcttttaaagaacctagattggtcattgtaaccgatccaagatctgatgcacaagccattaaggaagcttcatacgttaacattccagttatcgccctgactgatttggattccccttctgaattcgtcgacgtcgctattccatgtaataacagaggcaagcactctatcggtcttatttggtatttgttggctagggaagttttgagattgagaggtgctctagttgatagaacccaaccatggtccattatgccagacttgtacttctacagagacccagaagaagtcgaacaacaggtcgcagaagaagcaacaacggaggaagctggagaagaagaagctaaggaagaagttaccgaagaacaagctgaagctacagaatgggctgaggagaacgctgacaatgtcgaatggtaa

SEQ ID NO: 4687 - DNA, 1314 bp, Artificial Sequence
  Optimized genes for Saccharomyces cerevisiae
atggctgtctctaaggtttacgctagaagcgtttatgattctagaggtaacccaactgttgaagttgaattaacaacagaaaagggtgtcttccgttccatcgtcccatccggtgccagcaccggtgtccatgaggcgttggaaatgagagacggtgacaagtctaaatggatgggcaaaggtgtcttgcatgccgtgaaaaatgttaacgacgtcattgccccagctttcgttaaggctaatatcgacgttaaggatcaaaaggctgttgacgattttctgattagtttagacggtactgctaacaagtccaagttgggtgctaacgctatcttaggtgtttccttagcagcttctagagcagccgcggcagaaaaaaacgttcctttgtataagcacttggctgatctatccaagtccaagacctccccatacgtgttgccagttcctttcttgaacgttttaaacggtggttctcacgctggtggtgcacttgccttgcaagagttcatgattgccccaactggtgccaagaccttcgctgaagccttgagaattggaagtgaggtttatcacaacttgaagtctctaaccaagaagcgttacggggcttccgctggtaacgttggcgacgaaggtggtgtcgccccaaacattcaaactgctgaagaagccctagaccttatcgtagacgctattaaggctgctggacatgatggtaagatcaaaataggtctcgactgtgcttcttctgaatttttcaaagacggtaagtacgacttggacttcaagaatccaaactcagataagtctaagtggttgactggcccccaattggctgatttataccattctttgatgaaaaggtaccctattgtgtcgatcgaagatccatttgccgaagatgattgggaagcttggtctcacttctttaagaccgctggtattcaaattgtcgccgacgatttgacagtcactaacccaaagagaattgctacggctatcgaaaagaaagctgctgatgctttgttgttgaaggtcaatcagattggtaccttgtctgaatctattaaggctgctcaagactctttcgccgccggctggggtgtcatggtttcacacagatccggtgaaaccgaagatacttttatcgcagatttggtagttggtttgagaactggtcaaatcaaaactggtgccccagctcgttcagagagattagctaaattaaatcaactattgagaatcgaagaagaactgggtgataacgcagtttttgctggtgaaaatttccatcacggtgataaattgtaa

SEQ ID NO: 4688 - DNA, 1161 bp, Artificial Sequence
  Optimized genes for Saccharomyces cerevisiae
atgagattgtccaatttaatcgcctctgcaagcttgctatcggctgctactcttgcagctccagccaatcatgaacacaaagataagagagctgttgtcacaaccactgttcaaaagcaaaccactattattgttaacggtgccgcctctacacccgttgccgctttggaagaaaacgctgtcgttaactctgctcctgctgccgctacttcgaccacttccagtgccgcttcagtcgctactgctgctgcatcctcaagtgaaaacaattcccaagtctccgcggcagcttccccagcctcctcatcagctgccacctccacgcaatcctctagctcctctcaagcttcttcttcttctagttctggtgaagatgtatcttctttcgcctccggtgttagaggtattacttataccccttatgaatcttctggggcttgtaaatctgcttccgaagttgcttctgacctagctcaattgaccgacttcccagttatcagattgtacggtactgactgtaaccaagtcgaaaatgttttcaaagcgaaggcttctaaccaaaaagtttttttgggtatttactacgtcgatcaaatccaagacggtgttaacacaattaagagtgctgtcgagtcttacggttcctgggatgatgtgacaaccgtatctattggtaacgaattggtcaacggcaaccaggctactccatcacaagtgggtcagtatatcgatagcggtcgtagcgctctgaaggctgctggttatactggcccagttgtctccgttgacaccttcatagctgtcatcaataacccagaattgtgtgactactctgattacatggctgttaatgcccacgcctacttcgataaaaatactgttgctcaagactctggtaagtggttattagagcaaatccaaagagtttggactgcctgcgatggtaagaagaacgtcgttattactgagtcgggttggccatccaagggagaaacctacggtgtggcagttccatcaaaggaaaaccaaaaggacgcagtttctgctattacctctagttgtggtgccgatacctttttgtttactgccttcaacgactattggaaggctgacggtgcttacggtgtcgaaaagtactggggtatcttgtctaacgaataa

SEQ ID NO: 4689 - DNA, 942 bp, Artificial Sequence
  Optimized genes for Saccharomyces cerevisiae
atgagattttctactaccttagctacggctgctactgctttgttcttcactgcttctcaagtctcagccatcggtgaattggctttcaatttgggtgttaagaataacgacgggacttgtaagtctactagtgattacgaaaccgaattgcaagctttgaagagctacacttcaaccgttaaggtttacgctgcttctgattgtaatactttacaaaacttgggtccagctgctgaggcagaaggtttcaccatttttgtaggtgtatggccaactgatgacagtcattatgcggctgaaaaagctgccttgcaaacatacttgccaaaaatcaaagaatctacagttgctggtttcttagtcggttctgaagctctatacagaaacgacttaaccgcttctcaattgagcgataagattaacgatgttcgttccgttgtcgccgacatttctgactcagacggtaagtcctattctggtaaacaagttggtaccgtggattcctggaacgtcttggttgccggctataactccgccgtcatcgaggcttctgacttcgtcatggccaacgccttttcttactggcaaggtcaaactatgcagaacgcttcctactccttcttcgatgacatcatgcaagcacttcaggttattcaatctactaagggttctactgatatcaccttttgggttggtgaaactggctggccaaccgacggtaccaattttgaatccagttatccatcagttgataatgccaagcaattctggaaggaaggtatttgctctatgagagcatggggagtcaacgtcatagttttcgaagctttcgatgaagactggaagcctaacacttccggtacctcggatgtcgaaaagcactggggtgtgtttacatcttctgacaacctaaaatactccctggactgtgatttctcctaa

SEQ ID NO: 4690 - DNA, 366 bp, Artificial Sequence
  Optimized genes for Saccharomyces cerevisiae
atgtctgatttccaaaaagaaaaggtcgaggaacaagaacagcaacaacagcaaattataaagatcagaattaccctaacaagtaccaaggtcaagcaattggaaaacgtctcttccaatattgttaagaacgccgagcaacacaacttggttaaaaagggtccagttagattgccaaccaaggtcttaaaaatctctactagaaagactcctaatggtgaaggttccaagacttgggaaacctatgaaatgagaattcataagagatacattgacttggaagctccagttcaaattgttaaacgtatcactcaaatcactatcgaaccaggtgtcgatgttgaagtagttgtggcttcaaactaa

SEQ ID NO: 4691 - DNA, 771 bp, Artificial Sequence
  Optimized genes for Saccharomyces cerevisiae
atggctccaggtaagaaggttgcgccagcaccattcggtgctaagtccactaaatctaacaagacccgtaaccctttaacccattctacaccaaaaaatttcggtatcggtcaagctgtacaaccaaagagaaatctatcgagatatgttaagtggccagaatacgttagagtccaaagacagaagaaaattttgtctatcagacttaaggttccaccaaccatcgctcaatttcaatacactttggatagaaacacggctgccgaaaccttcaaattattcaacaagtataggcctgaaactgctgccgaaaagaaagaaagattgactaaggaagctgctgctgtcgccgaaggtaaatccaagcaagacgcatcccccaagccatacgctgtcaagtacggactaaaccacgtcgttgccttgattgaaaacaaaaaggcaaaattggttttgattgctaacgacgttgacccaattgaattggtcgtttttttgccagccttatgtaagaagatgggtgttccttacgctatcgtcaagggtaaggctagattaggcactttggttaatcaaaagacttcagctgtggctgctttgacagaagtgcgtgccgaagacgaggccgctctggctaaattggtcagcaccattgacgctaacttcgccgataagtatgatgaggttaaaaagcactggggtggtggtattttgggtaataaggcccaagccaagatggataagagagctaagaactctgatagtgcttaa

SEQ ID NO: 4692 - DNA, 1593 bp, Artificial Sequence
  Optimized genes for Saccharomyces cerevisiae
atgtcagcaacaaagtctattgtcggtgaagccttagaatacgttaacattggtttgtcacacttcttggccttgccattagctcaaaggatatccctaattattattatcccatttatttacaacattgtgtggcaattgttgtactcccttagaaaggatagaccgccattagtcttctactggatcccatgggttggttctgctgtcgtttatggtatgaaaccatatgaattcttcgaagagtgtcaaaaaaagtacggtgatattttctctttcgttctgttgggtagagttatgacagtttacttaggtccaaagggtcacgaattcgtgtttaatgcaaagttggccgacgtctccgctgaagctgcttatgctcacttaactactcctgtattcggtaagggtgttatttacgattgcccaaattctagattgatggaacaaaagaagttcgtgaaaggtgcgttgactaaagaagcattcaagtcttacgttcctttgattgctgaagaggtttataagtactttagagatagcaagaatttcagactaaacgaaagaaccactggcactatagatgttatggtcactcaacccgaaatgaccatttttaccgcctctagatctttgttaggtaaggaaatgcgtgctaaattagataccgacttcgcttatttgtactctgatttggacaaaggttttaccccaattaacttcgtctttccaaacttgccattggaacactacagaaagcgtgaccatgcccaaaaggctatctccggtacttacatgtccttgatcaaagaaagaagaaaaaacaacgatatccaggatagagacttaatcgattctctaatgaagaactctacctataaggacggtgttaagatgactgaccaagaaatcgccaatctgttgatcggtgttttgatgggtggtcaacatacttccgctgctacttccgcttggatcttactgcatttggccgaaagacctgacgttcaacaagaattgtatgaagagcaaatgagagtcttggacggtggtaaaaaggaattgacgtacgacttgttgcaagaaatgccactattgaaccaaaccatcaaggaaaccttgcgtatgcatcaccctttacactctttgtttcgtaaggttatgaaagatatgcacgtcccaaacacttcctacgtcattccagccggctatcatgttttggtatcgcctggttacacacacctcagggatgaatactttccaaacgctcatcagttcaacattcacagatggaataaggacagtgctagtagctactctgtcggtgaggaagttgattacgggtttggtgctattagtaaaggtgtctcatccccataccttccattcggaggtggtagacacagatgtatcggtgagcatttcgcttattgtcaattgggcgttcttatgtctatttttattagaactttgaagtggcattaccccgaaggtaagactgttccaccaccagacttcacatctatggtcaccctaccaaccggacctgctaagatcatctgggaaaagcgtaacccagaacaaaagatctaa

SEQ ID NO: 4693 - DNA, 1392 bp, Artificial Sequence
  Optimized genes for Saccharomyces cerevisiae
atgagcgatggtacccaaaagttgtggggtggcagattcacaggtgaaactgatcctttgatgcacctatataatgcttctttaccatacgactacaagatgtataaggctgacctagaaggtaccaaggtttacacggctggattgcagaagttgggtttgttgactgaaactgaacttgctaagattcatgaaggtttggctgaaatcaaaaaagagtgggatgccgacaaatttgttagacatcctaacgacgaagatattcatactgccaatgagagaagattgggtgaattaatcggtagagacattgctggtaaggtccacaccggtcgttctagaaacgatcaagttgttaccgatttgagaatctattgcagagacatcgttaatgatactttgttcccagccttaaaagggttagtggaagttttgattaagagagctgaaggtgaaattgacgttctgatgccaggttacactcatctacaaagagcccaacctattagatggtctcactggttgtcctcctacgctacctacttcacagaagattacaaacgtttaggccaaattttacatagattgaatcaaagtccattgggtgcaggcgctttagctggtcacccatacggtattgatagggaatttctggctgaaggtttgggttttaactccgtcatcggtaactccttggtcgctgtgtctgacagagattttattgttgaacttatgttttggggtactttgttcatgaaccatatctctcgtttcgctgaagatcttattatctattgtactgctgaattcggtttcattcaattgtctgacgcttactctactggttcttctttgatgccacagaagaagaacgccgatagcttggaattattaagaggtaaatcgggtagagtatttggtgatttgactggtttcttgatgtctttgaagggtattccatccacctacgataaagatatgcaagaagacaaggaaccattatttgattgtttgaccactgttgaacactctatgctaattgctaccggtgtcatctcaaccttgactgtcaacaaggagaagatggaagctgcattgacaatggatatgttggctaccgacttggcagactatttggttcgtaagggtgtccccttcagagagactcaccacatatccggagaatgtgttgcgaccgccgaacgtctaggtttaagtggtatcgacaagctcactttagaacaataccaaaaaatcgactctagattcggccaagacttgttcgaaactttcaacttcgaacaatcagtcgagagaagggacgccacaggtggtactgccaagtccgctgtcttgaagcaactggacaacctaaagtcacaattgaactaa

SEQ ID NO: 4694 - DNA, 249 bp, Artificial Sequence
  Optimized genes for Saccharomyces cerevisiae
atggtccttgttcaagacctattgcacccaactgctgcctcagaagctagaaagcataagttaaagactttggttcaaggtccacgtagttactttttagatgttaaatgtccaggttgtttgaacattactaccgtgttctctcacgctcaaacagctgttacctgcgaatcttgttctaccgtcttgtgtactcctactggtggtaaggccaagttgtccgaaggtacctccttcagaagaaaataa

SEQ ID NO: 4695 - DNA, 186 bp, Artificial Sequence
  Optimized genes for Saccharomyces cerevisiae
atgttctccgagttgattaattttcagaacgaaggtcacgaatgccaatgtcaatgtggtagctgtaagaacaatgaacaatgccaaaagagttgttcttgtccaactggttgtaactccgacgataaatgcccatgtggtaacaagtctgaagaaaccaagaaatcttgttgttcaggtaagtaa

SEQ ID NO: 4696 - DNA, 978 bp, Artificial Sequence
  Optimized genes for Saccharomyces cerevisiae
atgaaatttaatttctctactattttcaatattttgttcttcttgtttaccttgattgaagccaactcaaacggtgaaactgttaagttaatcacatctgatggtatcgtttactcatatgctgtgtacaccaagacgttagccccagctagagttgtcgtgaaaactatttcctacactactacaagagtttatccaatcaccttggccaactctgttgtcagctccaccaccgagaagattaccgaagtctctacagtttccgcatccgaacaagtcagtgctactcagacgaactcattggttagcacttctactgtctccaccatctctccaaccatttcgtctggttccagtacatctagttcctctacctacgatatcgagtcgtctcaatctattgaatcctctggtacttcttctgcaactgctgaaccatccgcttcctctggtttcagacttacttctagctctgcttttgtctcttccaccgctcctttcagttctcaattgtcttcttcctcctcctctgaaacttcctcatcatctttctccacctcctcctcctctgctcctttgtccttaacttcttcctctagttcttcaagctcttttgctacaattatcactttggcgccaagttcatccaagtcgggtaactctcaactgaccttggcctcatcttcttctacttccgccgttgaatcctctcaaaccggctccactattgctcgtacaacttccactttggttccatcatcttctgtagacaccaccagtagagctaccactagcatgccactagaatcttcctcgactcaatctatttctgtctcttctagtgatggtacttgttacgtcttctatgacgatgacgactattactctaccgtttacctaacaaaccccagccaatctgtagatgctgccaccactataacttccaccaatactatctacgctactgttactatctaa

SEQ ID NO: 4697 - DNA, 390 bp, Artificial Sequence
  Optimized genes for Saccharomyces cerevisiae
atgtctacttctagtgtcagatttgcctttagaagattctggcaatcagaaaccggacctaagactgtccacttctgggcaccaactttaaagtggggtctagtttttgctggtttctctgatatgaaaagaccagtggagaagattagcggtgctcaaaacttgtctctgttatccacagccttgatttggactcgttggtctttcgttatcaagccaagaaacatcttgttggcttccgttaactcattcttgtgtttaaccgctggttaccaattgggtagaatcgctaactacagaattcgtaatggtgactcgatttcccagctttgttcttatatcttgtctggtgctgatgaatccaaaaaggaaattactaccggcaggtaa

SEQ ID NO: 4698 - DNA, 1314 bp, Artificial Sequence
  Optimized genes for Saccharomyces cerevisiae
atggctgtcagtaaggtgtacgcgcgttctgtttacgatagtagaggtaaccctaccgtcgaagtcgaattgacaactgaaaaaggcgttttcagatctatcgtcccatccggtgcttcaactggtgtgcacgaagctctcgaaatgagggacgaagacaaatctaaatggatgggtaagggtgttatgaacgcagtaaacaatgttaacaacgttattgctgccgcattcgttaaggctaatcttgatgttaaggaccaaaaggctgtggatgactttttattgtcattggatggtactgccaataagtcaaagttaggtgccaacgctatcttgggtgtctccatggctgccgccagagcagcagctgctgaaaagaatgttccactataccaacatttggctgacctttctaagtctaagacatccccatatgttctaccagttccattcttaaacgtcttgaacggtggtagccacgcaggtggtgctttggctttgcaagagttcatgatcgcccctaccggtgctaaaacttttgctgaagctatgcgtattggttctgaagtttaccataacctaaagtccttgaccaagaaaagatatggtgcctctgccggaaacgttggtgacgaaggtggtgtcgctccaaacatccaaactgcggaagaggctttggatttgatcgtcgacgctattaaggctgctggtcatgacggtaaagtcaagattggtttggattgtgcttcttctgaattcttcaaggatggtaagtacgatttagactttaagaaccccgaatctgacaagtccaagtggttgactggtgtcgaattggctgatatgtaccacagcttaatgaagagatatccaatcgtttctatcgaagacccattcgctgaagacgattgggaagcctggtctcacttcttcaagaccgctggtattcaaatagtcgctgatgatttgacagttaccaaccctgctagaatcgccacggctattgagaaaaaggccgcagacgctttattgttgaaggtcaaccagattggtaccttgtctgaatctattaaagccgctcaagactcctttgctgccaactggggggttatggtatcgcatcgttccggtgaaactgaagatacctttattgccgacttggttgttggcttaagaactggtcaaattaagactggagccccagctagatccgaaagactggccaagttgaatcaactgttaagaatcgaggaagagttgggtgataaagctgtttacgctggtgaaaatttccaccacggcgataaactataa

SEQ ID NO: 4699 - DNA, 1470 bp, Artificial Sequence
  Optimized genes for Saccharomyces cerevisiae
atgtcagctgattttggtttaattggtttggccgtcatgggtcagaacttgattttgaatgctgcagaccacggtttcaccgtttgtgcctacaacaggactcaatcaaaggttgatcatttcttagctaacgaagctaaaggcaagtccatcattggggccacctctatcgaagatttcatctctaagttaaagagacctagaaaggtcatgttgttggttaaggcaggtgccccagtcgacgcgttgattaaccaaatcgtaccattgctggaaaaaggtgacatcatcatcgatggtggtaactctcattttcctgattccaatcgtagatatgaagaattgaagaaaaagggcatcttgttcgttggttccggtgttagtggtggtgaagagggtgctcgttatggtccatcccttatgccaggaggttctgaagaagcttggccacatattaagaacatttttcaatctattagcgctaaatctgacggtgaaccttgttgtgaatgggtcggtccggctggtgccggccattacgtcaaaatggttcacaatggtattgagtacggcgatatgcaacttatctgtgaagcgtacgacattatgaaaagattaggtgggttcactgacaaagaaatctccgatgttttcgctaagtggaacaatggtgtgttggactcttttttggtcgaaatcacaagagacattttgaagttcgacgacgtcgacggtaagcctttggtcgaaaagattatggataccgctggtcaaaagggtactggtaagtggactgctatcaacgccttggacttgggtatgccagtcactttgatcggtgaagcagtgttcgctagatgtctgtctgctctaaaaaacgaaagaattcgtgcctctaaggttttaccaggtccagaagttccaaaggatgctgtcaaggacagagaacaattcgttgatgatttagagcaagccttgtacgcctctaagattatatcctacgctcaaggattcatgttaatccgtgaagcagctgcaacttatggttggaagttgaacaacccagccatcgctttgatgtggagaggtggctgcattattagatcagttttcttgggtcaaattacgaaggcttacagagaagaaccagacctagaaaatttgcttttcaacaagttttttgctgatgccgttaccaaggctcagtccggttggagaaagtctatagccttggctaccacctacggaattccaactccagctttctcgactgctttgagtttctacgatggttatagatctgaaagattaccagctaatctactacaagctcaaagagactactttggtgctcacacctttagagttttaccagagtgcgcctccgataacctccccgtagataaagatattcacattaactggactggtcacggtggtaacgtgtctagctctacatatcaagcttaa

SEQ ID NO: 4700 - DNA, 525 bp, Artificial Sequence
  Optimized genes for Saccharomyces cerevisiae
atgtctgctatcccagaaaatgccaatgttaccgttttgaacaagaacgaaaagaaagcccgtgaattaataggtaaacttggtttgaaacaaatcccaggtatcattagagttacctttagaaagaaggataaccaaatttacgctatcgaaaagcctgaagtgttcagatccgctggtggtaattatgtcgttttcggtgaagcgaaagtagataatttcacacaaaagttagctgccgctcaacaacaagcacaagcatccggtattatgccatccaacgaagatgtcgctactaagtctccagaagatatccaagccgacatgcaagctgccgctgagggtagtgttaacgctgctgctgaagaagacgacgaggaaggcgaagttgacgccggtgacttgaacaaggatgacattgaattggttgtccagcagactaacgtctctaagaaccaagccattaaggcattgaaagctcacaacggagatctagtcaacgctattatgtctttgtcaaagtaa

SEQ ID NO: 4701 - DNA, 855 bp, Artificial Sequence
  Optimized genes for Saccharomyces cerevisiae
atggctattgatgctcaaaaattggtcgtcgttattgtcattgtcgttgttcctttattgttcaagtttattatcggtccaaaaaccaaaccagtcctcgacccaaagcgtaacgactttcaaagctttccattggtagaaaagaccattttaacccataatacctctatgtacaaatttggtttgcctcacgccgacgatgttctgggtttgcccattggtcaacatattgtcataaaggctaatattaacgggaaagacatcactaggtcgtacactcctacgtctttagacggcgatactaagggtaacttcgaactattagtaaagtcttacccaacaggtaacgtttctaagatgatcggagagttgaagattggtgattccattcagatcaagggtccaagaggtaactatcactacgaaagaaactgtcgttcccacttgggtatgattgctggtggtaccggtattgctccaatgtatcaaattatgaaggccatcgccatggacccacacgatactactaaggtctccttggttttcggtaacgttcacgaagaagatatcttgttgaaaaaggaattggaagctttggttgccatgaagccatctcaattcaagatcgtctattacttggattctccagacagagaggactggactggtggcgtgggttacatcaccaaggatgttatcaaggaacatttaccagctgctactatggacaatgttcaaatccttatctgtggtcctccagctatggttgcatctgtgagaagaagtacagttgatttgggtttcagaagatccaagccactatcaaaaatggaagatcaagtcttcgttttctaa

SEQ ID NO: 4702 - DNA, 366 bp, Artificial Sequence
  Optimized genes for Saccharomyces cerevisiae
atggcccaaagagttacctttagaagaagaaacccttacaacactagatccaacaaaattaaggtcgtgaaaaccccaggtggcattttaagagctcaacatgttaagaagttggccactagaccaaaatgcggtgattgtggttcagctctacagggtatctctactttgagaccacgtcaatacgctactgtcagtaagacccacaaaacagtttctagggcttatggtggttcccgttgtgctaattgtgttaaggaaagaatcgttagagctttcttgattgaagaacaaaagatcgtcaagaaggtagtcaaggagcaaactgaagccgcaaagaagtctgaaaaaaagagcaagaagtaa

SEQ ID NO: 4703 - DNA, 600 bp, Artificial Sequence
  Optimized genes for Saccharomyces cerevisiae
atgtccgttgaaccagttgttgtcatcgatggtaagggtcacttggttggaagattagcatcagttgttgccaaacagctgttaaacggtcaaaagattgttgttgtcagagctgaagaattgaacatctctggtgaattcttccgtaataaacttaagtaccatgatttcttgcgtaaggcaactgctttcaacaagactagaggcccttttcacttcagagctccatctagaattttctacaaggctttgcgtggtatggtttctcataagaccgctagaggtaaggctgctttagagaggctaaaagtgtttgaaggtattccaccaccatatgataagaagaaaagagttgttgtcccacaagctttgagagtgttgagattgaaacctggtagaaagtacaccactctaggtaagttgtctactagcgtaggttggaagtacgaggacgtcgtcgctaagttagaagctaaaagaaaggtctcttccgctgaatattacgccaagaagagagcctttaccaagaaggtcgctagtgccaacgcaacagccgctgaatcggacgtcgcgaaacaattggccgccttgggttattaa

SEQ ID NO: 4704 - DNA, 5277 bp, Artificial Sequence
  Optimized genes for Saccharomyces cerevisiae
atgaaagttagtgatcgtaggaagttcgaaaaagctaacttcgatgaatttgaatctgcattgaacaacaagaacgatctagttcactgccctagtattactttgttcgaatctatcccaaccgaagttcgttctttctacgaagatgaaaagtccggtttgattaaagttgttaagttccgtacaggtgctatggaccgtaaacgttcttttgaaaaagtcgtaatttccgtcatggtgggtaagaacgttaagaagttcttgaccttcgttgaggatgaaccagacttccaaggcggtccaatcccatccaaatacttgattccaaaaaagattaatcttatggtttacactctattccaagtccacactctgaagttcaaccgtaaagactacgatacattgtccctattctatttgaacagaggctattacaacgaattgtctttcagagtgttggaaagatgccatgaaatcgcctctgccaggccaaatgattcttctactatgaggacctttacagacttcgtgtcaggtgctccaattgtccgttctttgcagaagtccaccatccgtaagtatggttacaacttggcaccatacatgtttttgctgttacatgtcgatgaattgtctattttctctgcctaccaggcttctctacctggagaaaagaaagtcgacactgaaaggttaaagagagacttgtgtcctagaaagccaatcgaaattaaatacttcagtcaaatttgtaacgatatgatgaataagaaggaccgtctcggagatatcctccacattattttaagagcttgtgctctgaacttcggagctggtccacgtggtggtgctggtgacgaagaagatagatcgattaccaatgaagaaccaatcattccatcagttgacgaacatggtttaaaggtttgtaagttacgctctccaaacaccccaagaaggttaagaaaaaccctggacgctgttaaggctttgttagttagcagctgtgcttgtactgctagagatttggatattttcgacgataacaacggtgtcgctatgtggaaatggattaaaatcttgtaccacgaagttgcgcaagaaacaactttaaaggattcttatagaattaccttggtcccatcctctgacggtatttctttattggcctttgctggcccacaaagaaacgtatacgtcgacgacactacccgtagaatccaactatacaccgattataacaagaacggttcatcagaaccgagactaaagactttggacggtttaacttctgattatgttttctactttgtaaccgtgttgagacaaatgcaaatctgcgctttgggtaactcttatgacgctttcaaccacgatccttggatggatgtagtaggttttgaagacccaaaccaagtcaccaacagagacatctctagaatcgtcctttattcctacatgttcttgaacaccgctaagggttgtttggtggaatacgccacttttagacaatacatgagagaattgccaaagaacgctccacaaaagctaaactttagagaaatgagacaaggtttgatcgcattaggtagacactgtgttggctccagattcgaaacagatttgtacgaatcagctaccagtgaattaatggccaaccattctgtacagacaggcagaaatatctatggtgtggacagctttagtttgacttcagtttccggaaccaccgcaaccttgttgcaagaaagagccagcgaacgatggatacagtggttaggtttagagtctgactaccattgttccttttcatccaccagaaatgcagaggatgttgttgctggtgaagctgcttcgtcaaaccatcatcagaagatcagtagagttactagaaagcgtccaagagaaccaaagtccactaatgacattttggtcgctggtcaaaagttgttcggttcctcctttgagttccgtgatttgcatcaattgagattgtgttacgaaatctatatggctgatactccatccgtcgcagtccaagctccaccaggttacggtaaaactgaattgtttcacttacccttgattgcattggcctctaagggtgatgttgagtacgtctcttttttatttgttccatacacagttttgctggctaattgcatgatcaggttgggtagatgtggttgtttgaacgttgccccagtcagaaacttcattgaagagggttacgatggggttaccgacttgtacgttggcatctacgacgacttggcttcgacgaactttacagatagaatagccgcttgggaaaacattgttgaatgcactttcagaaccaacaatgtcaagttaggttacttgatcgttgacgaattccataacttcgaaactgaggtttacagacagtctcaattcggtggtattactaatcttgattttgacgctttcgaaaaagccatcttcttgtctggtaccgccccagaagctgtcgctgacgcagctttgcaaagaatcggtttgaccggtctagctaagaaatcgatggatatcaatgagctaaagagatctgaagatctttccagaggactgtcttcatatcccactagaatgttcaacttgatcaaggaaaaatctgaagttccattaggtcacgtccacaagatcagaaaaaaggttgaatcccaaccagaagaagctttaaagttattgctcgccctattcgaatctgaaccagaatctaaggctattgtggtcgcatctaccacaaatgaagtcgaagaattagcttgctcttggagaaagtacttcagagttgtctggattcacggtaagttgggtgctgccgaaaaagtctctagaactaaggaattcgtcactgatggtagtatgcaagttcttatcggtaccaagttggttacggaaggcattgacattaagcaacttatgatggttattatgttggataacaggctaaacattatcgaattgattcaaggtgtcggtagactaagagacggtggtttatgttacttgttgtccagaaaaaactcctgggctgctagaaatcgtaagggtgaattgcctcctattaaagaagggtgtatcaccgaacaagtgagagaattctacggtttggaatctaagaaaggtaagaagggtcaacacgtcggttgttgtggttccagaactgatctttctgccgacacagtcgaattgattgaaagaatggacagattggctgaaaagcaagcgaccgctagcatgtctatcgttgccttgccatcatctttccaagagagcaactcctcagacagatatagaaagtattgttcctctgacgaagattcaaatacttgtatccacggttccgctaacgctagcactaatgcttccactaatgctattactactgcttctactaacgtgagaactaacgctactacaaacgcctctactaatgcgactaccaatgcttctacaaatgcctccaccaacgccactactaacgcttctacgaacgctacaaccaactctagtaccaacgctactactactgcttctactaatgtcagaacctccgctactactactgcttccataaacgtcagaacatctgctaccaccaccgaatcaaccaactcttccaccaatgctaccactacagaatcgactaactcctctaccaatgcgactactactgaatctactaactccaatacctctgctaccacaactgcctccatcaacgttcggacctctgctacaacaactgaatccacgaactccagtactagtgctaccactacagcctctattaatgttagaacttctgcaactactactaagtctattaactcttctactaacgctactactactgaaagcaccaactcaaacaccaacgctaccaccaccgaatctaccaattcctccactaacgctactacgactgaatctactaattcttccaccaacgccactaccaccgaatctaccaacagtaacacctccgctgccactactgaatctaccaattccaacacttctgctactactaccgaatcgacgaacgcttccgcaaaagaagatgctaataaggatggtaacgcagaagataatcgtttccatccagtcactgacatcaacaaggaaagctacaagagaaagggttcccaaatggttttgttggaaagaaagaagttgaaggcccaattccccaacactagtgaaaacatgaatgtcttacaattcttgggttttagatcggacgagatcaagcacttattcttgtatggtattgatatttacttctgtccagaaggcgtttttactcaatacggtctttgtaagggttgtcaaaagatgtttgagttgtgtgtttgttgggctggtcaaaaagttagctacagaagaattgcctgggaagcattggccgttgaaagaatgttgagaaacgacgaggagtataaggagtacttggaagacattgaaccttaccacggggatcctgtcggttacttgaagtacttctctgttaagagaagagaaatctattcccaaatccaaagaaactacgcctggtatttggccattactcgtcgtcgcgaaaccatctcagtcttagattcaaccagaggtaagcaaggttcccaagtttttcgtatgtctggtcgtcagataaaggaattgtatttcaaagtttggtctaacttgagagaatctaagaccgaagtgttgcaatacttcttgaactgggacgaaaagaagtgccaagaggaatgggaagctaaggatgacacagttgtcgtagaggctttagagaagggtggtgttttccaaagattgagatctatgacttctgccggtttgcaaggtcctcaatacgtcaaactacaattctctagacatcatcgtcaattgagatcccgttatgaactttctttgggtatgcacttaagagatcaaatcgctttgggtgttactccatccaaagttcctcattggactgcttttttgtctatgttgattggcctgttttacaacaagacgtttagacaaaagctggaatacttgttagagcaaatttctgaagtttggctactaccacactggttagacttggctaacgttgaagttttagccgccgacgacaccagagtcccattgtatatgttgatggttgccgttcacaaagaattggattccgatgacgtccctgatggtagatttgacattttattgtgtagagattcttccagagaggttggtgaataa

SEQ ID NO: 4705 - DNA, 2049 bp, Artificial Sequence
  Optimized genes for Saccharomyces cerevisiae
atgttcttcaatagattgtccgctggtaagttgttggttcctttgtctgttgtcttgtacgccctatttgttgttattttacccttgcagaactctttccactcttctaatgtccttgttagaggtgcagacgatgtggaaaactatggaacagtaatcggtatcgacttgggtaccacttattcctgtgttgctgtcatgaagaacggtaaaactgaaatattggctaatgaacaaggtaaccgtatcaccccgtcttacgtcgctttcactgatgatgaaagacttatcggtgatgccgccaaaaatcaagtggcagctaaccctcaaaacaccattttcgacatcaaacgtttaatcggtttgaagtacaacgacagatctgttcaaaaggatattaaacacttgccattcaacgtcgttaataaggatggtaagccagctgtcgaagttagcgtcaagggtgagaagaaggtattcaccccagaagagatttcaggtatgattttgggtaagatgaagcaaattgccgaagattacttgggtactaaagtcacacacgcggttgttactgttccagcttacttcaacgatgcccagagacaggctactaaggacgctggtaccatcgcaggcttgaacgtcttgagaatcgttaatgaacctaccgctgctgctatcgcatatggtttggataaatccgacaaggaacatcaaattattgtttacgatttgggggggggcacttttgatgtctctttgttgtcgatcgaaaacggtgtctttgaagtgcaagccactagcggtgacacgcacctaggtggtgaggactttgactacaaaattgtgagacaattaatcaaggcctttaagaagaagcatggtatcgacgtttcggacaacaacaaggctttggctaaattgaaaagagaagccgaaaaagccaaacgtgccctgtcaagtcaaatgtccaccagaatcgaaattgactccttcgtcgatggcatcgacttatccgaaactctaaccagagctaagttcgaagaactgaacttggacctattcaaaaagacattgaagccagtcgaaaaggttctacaagattctggtttagagaaaaaggatgttgatgacattgttctggtcggtggttctactagaattccaaaagtccaacaactattagaaagttacttcgatggtaagaaggcttccaagggtattaatccagatgaggctgttgcttacggtgccgccgttcaagctggtgttttgtctggtgaagaaggtgtcgaagatatcgtgttattggacgttaacgctttaaccttgggtattgaaactacgggtggtgttatgactccattgattaagagaaacactgctattccaaccaagaagtctcaaatcttttctaccgctgttgataaccaaccaactgttatgataaaggtctatgaaggtgaaagagctatgtcaaaggacaataatttacttggtaaattcgaattgactggtattcctccagccccaagaggtgtcccacaaatcgaagttaccttcgctttagatgccaacggtattttgaaggtcagtgctactgataaaggtaccggtaaaagcgaatcaatcactattaccaacgataagggtcgtttgactcaagaagagattgataggatggtcgaagaagcggaaaagtttgcctctgaagatgcttctattaaggctaaggtagaatctagaaacaagttggaaaactacgctcactccttgaagaatcaagttaacggcgacttgggtgaaaagttagaagaagaagacaaggaaacattgttagacgctgctaacgatgtattggaatggcttgatgataacttcgaaacagctattgctgaagactttgatgagaagtttgagtccctctctaaggttgcatacccaatcacttccaagttgtacggcggtgccgacggatctggagcagctgactatgatgacgaagacgaagacgatgacggtgactatttcgaacatgacgagttgtaa

SEQ ID NO: 4706 - DNA, 999 bp, Artificial Sequence
  Optimized genes for Saccharomyces cerevisiae
atgattcgtattgctatcaatggttttggtagaatcggtagattggtcttgagattggccttgcaaagaaaggatatcgaggttgtcgctgtcaacgacccattcatttctaacgactacgctgcctatatggttaagtacgacagcactcacggtagatataagggtactgtctcccacgacgataagcacattatcattgatggtgtcaagatcgctacttaccaagaaagagatccagctaatcttccttggggttccttaaaaatcgatgttgctgttgactctacgggtgttttcaaggaactagatactgcacaaaagcacatagatgccggtgcaaagaaggttgtgatcaccgccccatcctcttctgctcctatgttcgttgtcggagtcaaccatactaagtacactcccgacaagaagattgtttctaatgcttcatgtaccactaactgtttggctccattagctaaagtcatcaacgatgctttcggtattgaagaaggtttgatgaccaccgtgcattctatgactgctacacaaaagacagttgacggtccaagtcataaggattggaggggtggtagaactgcttctggaaacatcatcccatcttccaccggtgcagctaaagctgttgggaaagttttgccagaattgcaaggcaagttaaccggtatggccttccgtgtcccaactgtggatgtttctgttgtagacctgaccgtcaaattggagaaggaagccacatatgaccagattaaaaaggctgttaaggccgccgctgaaggtccaatgaagggtgttttgggttacaccgaagatgcagtcgtttcctctgattttttgggcgacactcacgcttctatttttgacgcgtcggccggcattcaattaagtcctaagttcgtaaaattgatttcctggtacgacaacgaatacggttactcagctagagttgtcgatctaattgaatatgttgctaaagcttaa

SEQ ID NO: 4707 - DNA, 900 bp, Artificial Sequence
  Optimized genes for Saccharomyces cerevisiae
atgaaattgtccaagttgtctattttgacctctgccttagctacttccgctttagctgctccagccgtcgtgaccgttactgaacatgctcacgaagctgctgttgttaccgtccaaggtgtcgtttacgttgaaaacggtcagacaagaactacctacgaaacattggctccagcatcaacagccacgccaacttctacagctactgcccttgttgcaccacccgttgctccatccagcgcctcatctaattctgatgttgttttgtccgctttgaaaaacttggccagcgtttggggtaagaccactgactccaccaccactttgacgtcttctgaatctaccagtcaatctttggcacaagctaccactacttccactccagctgctgcttcaaccacttccactccagctgcgactactactacatcacaagccgctgcaactagctctgcttcttcttctgattctgacttgtccgactttgcgtcttctgttttagctgaacataacaagaagagagctttgcacaaagatacccctgctctgtcttggtctgataccctagcttcctacgctcaagattacgccgacaattatgattgttcgggtaccttgactcactctggtggtccatacggcgagaacttggctctagggtacgatggaccagccgctgtcgacgcttggtacaatgaaattagtaactatgatttcagtaacccaggtttctcctccaacactggtcatttcactcaagtggtctggaagtcgaccacccaagtcggttgcggtatcaagacttgtggtggtgcctggggtgactacgtaatctgttcctatgaccctgccggcaattatgaaggtgaatacgccgacaacgtcgagcctttagcataa

SEQ ID NO: 4708 - DNA, 6645 bp, Artificial Sequence
  Optimized genes for Saccharomyces cerevisiae
atggcaactatcgctccaacggcaccaattaccccaccaatggaatccactggtgacagattggttacattagagttgaaggatggtaccgtcttgcaaggttactccttcggtgctgaaaagtcggtggctggcgaactagtttttcaaactgggatggttggttatcctgaatccgtaactgatccttcctatgaaggtcaaattttggtcatcacctacccattggttggtaactacggagttccagatatgcacctaagagacgagttagtggaagagttgccaagatacttcgaaagtaacagaatccacatcgcaggtttggtaatctcccactacactgacgaatactctcattacttagctaagtcttccctaggcaagtggttgcaaaacgaaggtattccagctgtctatggtgttgacacccggtctttgacaaagcacttgagagatgctggttcaatgttgggtcgtctgtctttggaaaaatctggttctgatagaaccatttctcgttcatcatcttggagatctgccttcgatgtccccgaatgggttgacccaaatgtccaaaacttggtttctaaggtctctatcaatgaaccaaaactatacgttccaccagctgataacaagcacattgaattgcaaactggcccagacggtaaggtcctgaggattttagctattgacgttggtatgaagtacaaccagattcgttgttttattaaaagaggtgtcgagttaaaggtagtcccatggaattacgactttacgaaagaagactatgacggtttgtttatttctaacggaccaggtgatccatcagttctggatgacttatctcaacgtttgtccaacgtcttggaagctaagaaaactccagtgttcggtatctgcttgggtcatcaattgatcgccagagctgccggggcaagtacattgaagttgaagttcggtaacagaggtcacaacattccatgtacatcaaccatttccggtcgttgttacatcacttcgcaaaaccacggttttgccgttgacgtcgacactttgacttctggatggaagcctttattcgttaatgcgaatgatgactctaatgaaggtatctatcactctgagttgccatacttcagcgtccaatttcacccagaaagcactcctggaccaagagacactgaatttttgtttgacgtgtttatccaggcagtcaaggaattcaaatatacccaagtcttaaagcccatcgctttcccaggtgggttgttagaagataacgttaaggctcatccaagaatagaagctaagaaggtactagtcttgggttctggcggcttgtctattggccaagctggtgaattcgattactctgggagtcaagccatcaaggctctgaaggaggaaggtatatacaccattttgattaacccaaacattgccactattcaaactagcaagggtttggctgacaaggtttactttgttcctgtcactgctgagttcgtgagaaaagttatcctacatgaaagacctgacgccatatacgttactttcggtggtcaaactgccttatccgttggtattgctatgaaggatgaattcgaagctttgggtgttaaagtgttgggtacaccgatcgacactattatcactacagaagatagagaactatttagcaacgctatcgacgaaatcaatgaaaaatgtgctaagtctcaagctgcaaactccgttgatgaagccttggctgccgttaaggaaattggttttccagtcattgttagagctgcttatgctttgggtggtttgggtagcggtttcgccaacaacgaaaaggaattagttgatctttgcaatgttgctttttcctcctcccctcaagtgttggtcgagaagtcaatgaaaggttggaaggaagtggaatacgaagttgtcagggatgcattcgacaactgtattaccgtctgtaacatggaaaatttcgatccattgggtatccataccggtgattcgatcgttgtggctccatctcaaaccctatccgacgaagactacaacatgttgagaactaccgctgttaatgtcattaggcacttgggtgttgttggtgaatgtaacattcaatacgctttgaaccccgtttctaaggattattgcattattgaagttaacgctagattatcaagatcctcagctctagcctctaaggctacaggttacccattagcttatacggccgctaaactaggcctaaacattccattgaatgaagttaagaattcagtgaccaagagtacttgtgcttgtttcgagccatcattggattattgtgttgtcaagatgccaagatgggacttgaagaagtttactagagtttccactgaattatcgtcctcaatgaaatctgtcggtgaagtcatgtctattggacgcactttcgaagaagccattcaaaaggccatcagatctactgaatatgctaatttgggtttcaatgaaaccgatttggatatcgacatcgattacgaattgaacaacccaaccgatatgagagtcttcgctattgccaacgcattcgctaaaaaaggttactctgtcgacaaagtgtgggaaatgactaggatcgataaatggttcttgaataagttacacgatttagtccaattcgctgaaaaaatttcttcttttggcactaaggaagagcttccttccttagtcttgagacaagctaagcaattgggtttcgacgatagacaaattgccagatttttggattcgaatgaggtcgcgattagacgattaagaaaggaatacggtatcacccctttcgttaaacaaatcgacacggttgccgctgaatttccagcctacactaattacttgtatatgacctacaacgccgattcccatgacttgtccttcgatgatcatggtgtcatggttttgggttccggtgtatacagaataggctcttctgttgagttcgattggtgtgccgttaccgcggttcgtactctgagggctaacaacattaagactatcatggtaaactacaaccccgagaccgtctctactgattacgacgaagctgatagactctacttcgaaaccatcaacttggaacgtgttttggatatctacgaaattgaaaattcctccggtgtggttgtctctatgggtggtcaaacttctaacaacatcgctatgactttgcaccgtgaaaatgttaagattttgggtacttctcctgatatgattgactctgccgaaaacagatacaaattctccagaatgctggaccaaattggtgtggaccaaccagcttggaaggaattgacctctatggacgaagctgaatcctttgctgaaaaagtaggctacccagttttggtaagaccatcctacgttttgtctggtgctgctatgaacactgtttactctaaaaacgacctcgaatcctacttgaatcaagccgttgaagtttctagagactatcctgtggttattaccaagtacatcgaaaacgccaaagaaatcgaaatggatgctgtcgccagaaacggtgaattggtcatgcatgttgtttctgaacatgttgaaaacgcaggtgttcattccggtgacgctacccttatcgttccaccacaagatttggctcctgaaaccgtcgacaggatcgtggtagctactgcgaagatcggtaaggctttaaagattaccggtccttataacatccaattcatcgctaaggacaacgaaatcaaggttattgaatgtaacgtcagagcctctcgttcttttccatttattagcaaagtcgttggtgttaacttgatcgaactagctactaaagctatcatgggtcttcccttaactccttacccagttgaaaagctccctgacgattacgttgctgtcaaagtcccacagttctccttcccaagattagcaggtgctgatccggttttgggcgttgaaatggcttccactggtgaagttgccacattcggtcactctaagtacgaggcttatttaaagtctttgctggccactggttttaaattgccgaaaaagaacattttgctaagtatcggttcttacaaagaaaagcaagaactattgtcttcagtccaaaagctgtacaacatgggttataaactgtttgctacttctggtactgctgatttcttgtccgagcacggtatcgccgttcaatacttggaagttttgaacaaggacgacgatgaccaaaaatccgaatatagtttgacccaacatttggccaataacgagattgatttgtacattaacttgccatctgcaaatagatttaggagaccagcatcctacgtctctaagggttataagactagaagattggctgttgactatagtgtgccattagtcaccaacgtcaagtgcgccaagttgttgattgaagctattagcagaaacattaccttggatgtttctgagagagacgctcagactagtcatcgtactatcacattgccaggacttattaacatcgctacttacgtaccaaatgcttctcatgtcatcaagggtccagctgaacttaaagaaaccactagattgtttctagaatctggattcacctactgccaattgatgccacgttccatatccggtccagtcattactgacgtcgcgagtctgaaggccgctaactcagtctctcaggattctagctacactgacttctctttcaccatcgctggtaccgctcataacgcccactccgttacccagtctgcttctaaggttaccgctttgtttctacctttgagagaactaaaaaataagatcaccgccgttgctgaattgttgaaccaatggccaacagaaaagcaagtcattgcagaagctaagacagcagacttggcttcagttttgttgttaacttccttacagaatagatctattcacataaccggtgtcagcaacaaagaagatctcgctttaattatgactgtcaaggccaaggatccaagagtcacatgtgacgttaacatttactccttgttcattgctcaagatgactatccagaagccgtttttctcccaacgaaggaagatcaagagttcttctggaacaacttagactcaatcgatgccttctctgtcggtgctttaccagttgctttagctaacgtcaccggtaacaaggttgacgttggtatgggtatcaaggactcgctaccattgttgttggccgctgtcgaagaaggtaagttgactattgacgatattgtcttgagattgcatgacaacccagccaagatttttaacattccaacccaagattccgttgtagaaatcgacctagactatagttttagaagaaacaaaagatggtctcctttcaataaggacatgaacggtggtattgagagagttgtttacaacggtgaaactcttgtcttgtctggagagctagtctctccaggtgctaaaggtaagtgtattgtcaatccttccccagcctccatcactgcctctgcggaattgcagtcgacctccgccaagagaagattctctattaccgaagaagccattgctgacaacctagacgcagctgaagatgcaatccctgaacaaccattggagcaaaagttgatgtcaagtagaccaccaagagaattagtcgccccaggtgcaatccaaaacttgatccgtagtaacaacccttttcgcggtcgtcacatcttgtctattaagcaattcaaaagatccgatttccacgttttattcgctgtagctcaagaattgcgtgctgctgttgctagagaaggtgtcttagatttaatgaagggtcacgttatcactaccatctttttcgaaccaagcactcgtacttgttcgagtttcattgcagctatggaaagattgggtggcagaattgtcaacgttaatccattggtttcttccgttaagaagggtgaaactctgcaagataccatcagaacacttgcttgttattccgacgctattgtgatgagacattctgaagaaatgtctgtccatattgctgccaagtactccccagttccaatcattaacggtggtaatggttctagagaacaccccacacaagctttcttggatttattcacaattagagaagaaatcggtaccgttaatgggattactgttaccttcatgggtgatcttaagcacggtagaaccgtacactccttgtgtagacttttgatgcactaccaagtccgtatcaacttagttagcccaccagaattgagattgccagaaggtttaagagaggagttgagaaaggccggtcttttgggtgttgaatctattgagttgactccacatatcatttccaagacagatgttttatattgtaccagagtgcaagaagaaagattcaattctccagaagaatacgctcgtttaaaggacacttacatagttgataacaagatccttgctcacgctaaggaaaatatggctattatgcacccattacctagagtcaacgaaattaaggaagaggtcgactacgatcatcgtgctgcctatttcagacaaatgaagtacggtttattcgttcgtatggctttgttggccatggtcatgggcgttgatatgtaa

SEQ ID NO: 4709 - DNA, 264 bp, Artificial Sequence
  Optimized genes for Saccharomyces cerevisiae
atggaaaatgacaagggtcaattagtcgaattgtacgtgccaagaaaatgtagcgctaccaaccgtattattaaggctgatgaccacgcctcagttcaaatcaacgttgctaaggttgacgaagagggtagagcaatcccaggtgaatatattacttacgctttgtctggttacgtcagatccagaggtgaaagtgatgattctttgaacagattggcccaaaacgatggcttgctaaagaatgtttggtcctattctagataa

SEQ ID NO: 4710 - DNA, 1188 bp, Artificial Sequence
  Optimized genes for Saccharomyces cerevisiae
atgtccgaaggtattactgatatcgaggaaagtcaaatccaaacaaactacgacaaggttgtctacaagttcgacgacatggagttggatgaaaacttgctacgtggtgtgttcggttacggattcgaagaaccatctgcaattcaacaaagagctatcatgccaattatcgaggggcatgacgtcctagctcaagcgcaaagtggtaccggtaagaccggtactttttcaatcgcagccttgcagcgtatcgatacttctgtgaaagccccacaagctttgatgttggctcccaccagagaattagccttacagatccaaaaagtagttatggctctggcctttcacatggatattaaggtccacgcttgtattggtggcacttccttcgtcgaagatgccgaaggtttaagagacgctcaaattgttgttggtactccaggtagagtttttgacaatatccaaaggcgtagattccgtactgacaagattaagatgtttattttggatgaagccgatgaaatgctttcctccggtttcaaggaacaaatctaccaaatcttcaccctcctacctcctacaactcaagtggtcttgttgtctgctaccatgccaaacgacgttttggaagtcacaaccaagtttatgagaaacccagtcagaattttggttaagaaggatgaattgacattagaaggtatcaagcaattctacgtcaatgttgaagaagaagaatataagtacgaatgtttaactgatctgtacgactctatatcggtaactcaagctgttattttttgcaatactaggagaaaggttgaagaattgaccaccaaattgagaaacgacaaattcacggtctcagcaatctacagcgaccttcctcaacaagagcgtgatactataatgaaagaatttagatctggttcttccagaattttaatttccaccgatttgttagctagaggtattgacgttcaacaagtttctttggttatcaactatgatttgccagctaataaggaaaactatattcatagaatcggcagaggtggtagattcggtagaaaaggtgttgccattaacttcgtcactaacgaagacgttggtgctatgagagaactagaaaagttctattctactcagattgaggaattgccatctgatattgctaccttgttgaactaa

SEQ ID NO: 4711 - DNA, 402 bp, Artificial Sequence
  Optimized genes for Saccharomyces cerevisiae
atggacagagatcatattaacgaccatgaccacaggatgagctattcaattaacaaagacgatctactattgatggttttagctgtttttatcccaccagtcgctgtttggaagcgtaagggtatgttcaacagagatactctgttgaacttgttgttgttcttgcttttgtttttcccagccatcattcacgcctgttatgttgtgtacgaaacatctagtgaaagatcttacgatttatccagacgtcacgctactgcacctgctgtagatagagacttggaagctcatccagccgaagaatcccaagctcaaccaccagcctacgatgaggacgatgaagctggtgctgatgtccctttaatggacaataagcagcaattgtcttctggtagaacctaa

SEQ ID NO: 4712 - DNA, 555 bp, Artificial Sequence
  Optimized genes for Saccharomyces cerevisiae
atggctagatacggtgccactagcactaacccagccaaatctgcttctgctagaggttcctatcttcgtgtttctttcaagaataccagagaaactgctcaagccattaacggatgggaattgactaaagcacaaaagtacttagatcaagtcctagatcatcagagagcgattccatttcgtagattcaattcatccatcggtagaaccgctcaaggtaaggaatttggcgtcacaaaggctcgttggccagctaaatctgttaagttcgtccaaggtctgttgcagaacgctgcagctaacgctgaggccaaaggtttggacgctactaagttgtacgtgtcgcacatccaagtaaaccaagctccaaagcaaaggcgtagaacttacagagctcacggtagaattaacaagtatgagtctagtccttcccatatcgaattggtcgttaccgaaaaggaagaagcagttgctaaggccgctgaaaaaaaggttgttagattaacctctagacaaagaggtagaattgctgcccaaaagagaatttccgcctaa

SEQ ID NO: 4713 - DNA, 156 bp, Artificial Sequence
  Optimized genes for Saccharomyces cerevisiae
atggccgcacaaaagtctttcagaattaaacaaaagatggctaaggctaagaagcagaacagaccattgccacaatggatcagattgaggactaataacaccattcgttacaatgctaaaagaagaaactggagacgtactaagatgaacatctaa

SEQ ID NO: 4714 - DNA, 393 bp, Artificial Sequence
  Optimized genes for Saccharomyces cerevisiae
atgaccagaagctccgtcttggctgatgccttgaacgctattaacaacgctgaaaaaactggtaagagacaggttctgattagaccatcaagtaaggttatcatcaagttccttcaagttatgcaaaaacatggttacattggcgaatttgaatacatagatgaccaccgttctggtaaaattgtggtacaattaaatggtcgtttgaataagtgtggtgtcatttctcctaggttcaacgtcaagattggtgacatcgaaaagtggaccgccaacctattaccagctagacaattcggttatgttatcttgacaacttccgcaggaatcatggatcatgaagaggctagaagaaagcacgtctctggtaagattttgggttttgtttactaa

SEQ ID NO: 4715 - DNA, 999 bp, Artificial Sequence
  Optimized genes for Saccharomyces cerevisiae
atggtcagagtggctatcaacggttttggtaggattggtagactagttatgcgtatcgctttgcaaagaaagaacgtggaagttgtcgccttgaatgacccatttatctcgaacgactattcagcttacatgtttaagtatgattctacccacggtagatacgctggtgaggtttctcatgatgacaagcacattattgtagacggtcacaagatcgctacctttcaagaaagagatccagcaaacttaccctgggcctcattgaacatcgatatagccattgattctacaggtgttttcaaggaactagacactgctcaaaagcacatcgatgctggtgctaagaaggttgtcattactgcaccatcttccactgcacctatgttcgtcatgggcgttaacgaagaaaaatacacttccgatttaaaaatcgtttctaatgcttcctgtaccactaactgtttggctccattagctaaggttattaacgacgctttcggtattgaagaaggattgatgacaacagttcatagcatgaccgccactcaaaaaaccgttgatggtccttctcacaaggactggagaggtggtagaactgccagcggtaatattatcccatcttccactggtgccgccaaggcggtcggtaaggtccttccagaattgcagggtaagttgaccggtatggctttcagagtcccaactgtcgacgttagtgttgtcgacttgactgttaaactgaataaggaaaccacgtatgatgagattaaaaaagttgttaaagctgctgctgaaggtaagttgaagggggttttgggttacactgaagacgcagttgtctcttctgacttcttaggtgattccaactccagtattttcgacgctgctgccggtatccaattgtctccaaaattcgtcaagttggtttcctggtacgataacgaatacggctactctacccgtgtagttgatttggtggaacatgtcgctaaggcctaa

SEQ ID NO: 4716 - DNA, 1758 bp, Artificial Sequence
  Optimized genes for Saccharomyces cerevisiae
atgggtttgttgactaaggtagcaacctcgagacaattttctactaccagatgtgtcgccaagaagttgaacaaatactcttatatcatcactgagcctaagggtcaaggtgcctctcaagccatgctatacgctaccggttttaagaaagaagacttcaagaagccgcaagtcggtgttggttcttgttggtggtcgggtaacccttgtaatatgcacttgttggacctgaacaacagatgtagccaatctattgaaaaggcaggcttgaaggctatgcaattcaataccatcggtgtttccgatggtatcagtatgggcactaagggtatgcgttactcactccaatccagagaaattatcgctgactcctttgagacgataatgatggctcaacactacgatgcgaacattgctatcccatcctgtgataagaatatgccaggcgtgatgatggctatggggagacacaacagaccatctattatggtttatggtggtactattttgccaggtcaccctacctgtggttcctctaaaattagcaaaaacattgacattgtttctgctttccagtcttacggtgaatatatctctaagcaattcactgaagaagaaagagaagacgttgtcgaacatgcttgtcctggtccaggttcttgcggtggtatgtacacagctaatactatggctagtgcagctgaagttttgggtttgaccatcccaaattcctcttcctttccagctgtttctaaggagaaattagcggaatgcgataacatcggggaatatattaagaagactatggaattgggtatcttgccaagagacattttaactaaggaagccttcgaaaacgctatcacctacgtcgttgctactggtggttccaccaacgctgtcttgcatttagttgctgtcgctcatagtgctggtgtcaagctttcaccagatgatttccaaagaatttctgacaccactccacttatcggtgacttcaagcccagtggtaaatacgttatggccgatcttattaacgtcggtggtacacaatcagttattaagtacctatacgaaaacaacatgttacacggtaacaccatgacagtcactggtgacactttggctgaaagagcaaagaaagctccctctctgccagagggtcaagaaatcattaagccattaagccacccaatcaaagctaacggtcatttgcaaattttgtacggctccttggccccaggtggtgccgttggtaaaattaccggaaaggaaggcacttactttaagggtagagctcgtgtatttgaagaagaaggagccttcatcgaggctttagaaagaggtgagattaaaaagggtgaaaagacagttgtggtgattaggtatgaaggtccaagaggtgccccaggtatgccagaaatgttgaaaccatcttccgctttgatgggctacggtctaggtaaggatgttgccttattgactgacggtagattctctggtggttctcacggtttcttgattggtcatattgtcccagaagcagctgaaggtggtcctatcggtttggttagagatggagatgaaatcatcattgatgccgataacaacaagatagacttgttagtttcagataaggaaatggctcaacgtaagcagtcctgggtcgccccaccacctagatatactcgtggaaccctatctaaatacgctaagttggtctccaatgcttccaatggttgtgttttggacgcctaa

SEQ ID NO: 4717 - DNA, 534 bp, Artificial Sequence
  Optimized genes for Saccharomyces cerevisiae
atgtttaacacaactccaattaacatcgataaatggttaaaggaaaacgaaggtttattgaagcctccagttaacaactactgtcttcacaagggaggtttcaccgtcatgattgttggtggtcccaatgagcgtactggttaccatatcaaccctactccagaatggttctaccaaaaaaagggttccatgttgttgaaggttgtcgatgagaccgacgccgaaccaaaattcattgatattataatcaatgaaggcgactcctatttgctaccaggtaatgtcccacattctccagttagattcgctgatactgttggtattgtggtagaacaagacagaccaggtggtgaaaacgataagatcagatggtactgctctcactgtagacaagttgtccatgaatcagaattgcaaatgttagacttgggtacccaggtcaaggaagctatcctggattttgaaaatgacgttgaaaagagaacctgtttccactgtaagactttgaactatgctagacctcaatctaactaa

SEQ ID NO: 4718 - DNA, 936 bp, Artificial Sequence
  Optimized genes for Saccharomyces cerevisiae
atgagtgtttccgctgccccagctatcccacagtactctgtttcagattatatgaagtttgccttggcgggtgccattggttgtggttccactcattcatcgatggttccaattgacgtcgtcaagactagaatccagctggaaccaactgtatacaacaagggcatggtcggttccttcaaacaaatcatcgctggtgaaggcgccggtgctttgcttaccggtttcggacctaccttactaggttactcaatccaaggtgcttttaagttcggtggttacgaagttttcaagaaattttttatcgataatttaggttatgatactgcttctagatacaagaacagtgtgtatatgggttctgcagccatggctgaattcttagctgacattgctctatgtccattggaagctaccagaattcgtttggtctcccaacctcaatttgcaaacggtttggtgggtggattctctagaattttgaaagaagaaggtataggttctttttactctggtttcaccccaattttgttcaagcaaattccatacaatattgctaaattcttagtcttcgaaagagcttccgaattttactatggtttcgccgggcccaaggagaagttgtcttctacttccactaccctactcaacttattgtccggtttgacagctggtttggctgctgccatcgtttctcaaccagctgacacgttgttgagcaaagtcaacaagacaaagaaggcacctggtcaatctactgttggtctgttggctcaattagctaagcaattgggtttcttcggtagcttcgccggtttgccaaccagacttgttatggttggtactttgacttctttgcaatttggtatttacggttctttaaagtccacattgggctgcccaccaaccattgagatcggtggtggcggtcactaa

SEQ ID NO: 4719 - DNA, 318 bp, Artificial Sequence
  Optimized genes for Saccharomyces cerevisiae
atggaacatccagcttacaccttgtcattgttgactaccgccggtggtttgatggggtactaccgtaaaggttccattccatctctggttagtggtttggtcttcggttctgtttatggtattgccggttatcttttacacatgaacagagatggaggtttggaaatggctttaggtgcttctactctattgttgggtgcaggtgtgatcagaggtatgccaagcagatttacaaagccagtcccagttgttttgactgctctaggcggcttaggttcctactactactacaataagtataaggaattctacccttaa

SEQ ID NO: 4720 - DNA, 279 bp, Artificial Sequence
  Optimized genes for Saccharomyces cerevisiae
atggccaagagaactaagaaggttggtattactggaaaatacggtgttagatatggttcctcattgcgtagacaagtgaagaaattagaaattcaacaacacgctagatacgattgctctttctgtggtaaaaagaccgtcaagagaggcgctgctggtatctggacatgttcttgttgtaagaagactgtagctggtggtgcttacaccgtctccaccgccgctgctgccactgttagatctactatcagacgtttgagggaaatggtcgaagcataa

SEQ ID NO: 4721 - DNA, 465 bp, Artificial Sequence
  Optimized genes for Saccharomyces cerevisiae
atggtccaagccgtggccgtcttgaaaggtgatgctggtgtttcgggtgttgttaagttcgaacaagcttctgagagtgagccaaccactgtctcatacgaaatcgccggtaattccccaaacgctgaaagagggttccacattcacgaattcggtgatgccactaacggttgtgtctccgcaggtcctcattttaacccatttaagaagacccacggtgctccaactgacgaagttagacatgttggcgacatgggtaacgtcaagaccgacgaaaacggtgtggctaaaggttctttcaaggacagcttaattaagctaattggcccaacttccgttgttggtcgttctgttgtcatccatgctggtcaagatgatttgggtaagggagatactgaagaatctttgaaaacaggtaacgctggtccaagacctgcttgtggtgtaatcggtttgaccaattaa

SEQ ID NO: 4722 - DNA, 1023 bp, Artificial Sequence
  Optimized genes for Saccharomyces cerevisiae
atgaccgccccattggttgtcttgggtaacccactgctagatttccaagctgacgttactgctgaatacttggctaagtactctttaaaggagaacgatgctatcttggtagatgctaagtctggtgatgctaagatggccatttttgacgaattattacaaatgcctgaaactaagcttgtcgctggtggtgcagctcaaaacaccgctcgtggtgctgcttatgtcttgggtgctggtcaagttgtttacttcggttcagttggtaaagataagttttctgaaagattgttgaatgaaaatgagaaggctggagttaagtcaatgtatcaagtgcaaaatgatattggtactggcaagtgtgctgctctcattaccggtcacaatagatcgctggtgacggacctaggcgctgctaacttcttcacaccagatcatttggataagcactgggacttagtcgaagcagctaagttgttttacatcggtggttttcacttaaccgttagtcccgatgccatcgtaaagttgggtcaacacgcaaaagaaaactccaagccattcgtcttgaacttttctgcgccattcattccacatgttttcaaggatgccctagccagagttttgccatacgctactgttattattgccaacgaatctgaagccgaagccttctgcgacgcctttcaattggactgtgctaacactgatttggaagctattgctcaaagaatcgtcaaggacagcccagttgaaaagaccgttatcttcacacatggggtcgagcctactgttgttgtgtcctccaaaggtacttctacctacccagtcaaaccattggacagttctaaaatcgtcgacactaacggtgcaggtgatgccttcgctggtggtttcatggctggtcttaccaagggtgaagacttggaaacttccatcgacatgggccagtggttagctgccttgtctattcaagaagtcggaccttcttatccatctgaaaaaatatcctactccaaataa

SEQ ID NO: 4723 - DNA, 678 bp, Artificial Sequence
  Optimized genes for Saccharomyces cerevisiae
atgtccgacaccgaagccccagtcgaggttcaagaagacttcgaagtcgtagaagaattcacccccgttgttttagccactcctatccctgaagaggtccaacaagctcaaacggaaattaagttgttcaataaatggtcctttgaagaggtggaagttaaggatgcttctcttgttgattacgttcaagtcagacagccaattttcgtggctcataccgctggtagatatgctaacaagagattccgtaaggcccaatgtccaattatcgaacgtttaacaaactccttgatgatgaacggcagaaacaacggtaagaagctgaaggcagtaagaattatcaagcacactttagacataattaatgttttgactgaccagaacccaattcaagtcgttgtcgatgcgatcaccaacactggtccaagagaagacactactagagttggtggtggtggtgccgcaagaagacaagctgttgatgtttctccactaagaagagtcaatcaagctatcgctttgttgactattggtgccagagaagctgcttttaggaatatcaagacaattgccgaaaccttggctgaagaattgatcaacgccgctaaaggaagctcaactagttacgcaattaagaaaaaagatgaattggaaagagtcgctaagtctaaccgttaa

SEQ ID NO: 4724 - DNA, 1080 bp, Artificial Sequence
  Optimized genes for Saccharomyces cerevisiae
atgagtactaaagttgtgaatgtcgcggttattggcgccggtgtcgttggtagcgctttcctagatcaactactggctatgaagtctacaattacttacaacttggtcttattggctgaagctgaaagatccttgatctccaaggacttctccccattgaatgttggttctgattggaaagctgctttagccgcctctactacaaagaccctccctttggatgacctaatcgctcacttgaaaacctctccaaagcccgttattttggttgacaacactagtagtgcctatattgcaggtttctacactaagtttgttgagaacggcatttctatcgctactccaaataagaaggctttctcttccgacttggctacttggaaggccctgttctccaacaaacctacgaacggttttgtttaccatgaagctacagtcggtgccggtttgccaatcatttccttcttgagagaaattatccagactggtgatgaggtcgaaaagatcgaaggtatcttctccgggaccttgagctacatcttcaacgaattttctacttctcaagccaacgacgtcaagttttctgatgttgttaaggtggcaaagaagttgggttacaccgaaccagacccaagagatgacttaaacggtttggatgttgcacgtaaggttaccattgtcggtcgtatttctggtgttgaagtcgaatctccaacttctttccctgttcaatccttaattccaaagccattagaatccgttaagtcagctgatgaatttcttgaaaagttgtcggactatgacaaggatttgactcaattgaaaaaagaggctgctaccgaaaataaagtcttgagatttattggtaaagtcgacgtcgcaaccaaatctgtttcagtaggaatagaaaagtacgactactcgcacccattcgcttccttgaagggttctgataacgttatctcaatcaagaccaagagatatactaacccagtggtaatccaaggtgccggtgctggtgctgctgttaccgccgctggtgttttaggtgatgtcattaagattgctcaaaggctttaa

SEQ ID NO: 4725 - DNA, 786 bp, Artificial Sequence
  Optimized genes for Saccharomyces cerevisiae
atggctagaggtcctaagaagcacttgaagagattggctgctccacaccattggttgttggataagttatctggttgttatgctccaagaccatctgctggtccacataagttgagagaatcattaccattgattgtcttcttgagaaacagattaaagtacgcattaaatgggagagaggttaaagctatcttaatgcaacgtcacgttaaggtcgacggtaaggttagaacagacactacatatcctgccggtttcatggacgttatcaccttggatgccactaacgaaaacttcagattggtttacgatgtgaagggtcgtttcgctgttcacagaattaccgacgaagaagctagttacaagttgggtaaggtgaagaaagtccaactcggaaaaaaaggtgttccctatgttgttacccatgatggtagaacgattcgttaccctgatccaaacattaaggttaatgatactgtcaagatagacctagcctctggtaaaattactgattttatcaagttcgatgcaggtaaacttgtctacgtaactggtggtagaaaccttggtagaatcggtaccatcgtccacaaggaaagacatgatggtggttttgacttggttcacattaaggactccctagacaacaccttcgtcactcgtttgaacaatgtatttgtcatcggtgaacaaggcaaaccatacatctccttgccaaagggcaagggtattaaattgagcattgctgaagaaagagacaggagaagagcccagcaaggtctataa

SEQ ID NO: 4726 - DNA, 609 bp, Artificial Sequence
  Optimized genes for Saccharomyces cerevisiae
atggccactaatatcacttggcatccaaacttgacttatgacgaacgtaaggctttgagaaagcaagatggttgtactatttggttaaccggtttgtctgcttccggcaagtccactatcgcttgtgctttggaacagttgttgttgcaaaagaatttatctgcctacaggttggatggtgataacattcgtttcggattgaacaaggacctgggtttctcagagaaggacagaaacgaaaacatcagacgtatttcggaagtttccaagctatttgctgattcttgcgcgatctccattaccagtttcatttctccatacagagttgatagagacagagcaagagaattacacaaagaagctggtttaaaattcattgaaattttcgttgacgtcccattggaagtggccgaacaaagagatccaaagggtttgtacaaaaaggccagagaaggtgttattaaggaatttaccggtatctctgctccatatgaggctccaaaagctcctgaattgcatcttagaactgaccaaaaaaccgtcgaggaatgtgcaacaatcatctacgaatacttgatatctgaaaagattatcagaaagcacctataa

SEQ ID NO: 4727 - DNA, 417 bp, Artificial Sequence
  Optimized genes for Saccharomyces cerevisiae
atgtccacagactcaattgtcaaggcctctaattggagattagttgaagttggcagggttgttctaattaagaagggtcaatctgccggtaagttggcagctatcgttgaaattatcgatcaaaagaaagtgttgattgatggtccaaaggctggtgtcccaagacaagctatcaaccttggtcaagtagttttgactccattaaccttcgctctgcctcgtggtgccagaaccgccactgttagtaagaaatgggcagctgctgctgtctgtgaaaaatgggccgcttcttcctgggccaagaagattgctcaaagagagagacgtgcggctttgactgactttgaaagattccaagttatggtcttgagaaagcagaagagatacaccgtcaaaaaggctttggctaaagcttaa

SEQ ID NO: 4728 - DNA, 504 bp, Artificial Sequence
  Optimized genes for Saccharomyces cerevisiae
atgatcatttataaggatatcttctccaacgacgaattgttgagtgacgcttacgacgctaaattggttgatgatgttatttacgaagccgactgtgccatggtgaatgttggtggtgacaacattgatatcggtgccaatccatctgctgaaggcggtgatgatgatgttgaagaaggtgctgaaatggtcaacaacgttgttcactctttcagattgcaacaaactgctttcgacaagaaatctttcttaacctacattaagggatacatgaaggctgtcaaggccaagctacaagaaaccaaccctgaagaagttccaaaattcgaaaagggtgcacagacctacgttaagaaagttataggttcatttaaggattgggaatttttcacaggtgagtccatggacccagatgctatggtcgtcatgttgaactatagagaagacggtactactccatttgtagctatctggaagcatggtattgtcgaagagaagatttaa

SEQ ID NO: 4729 - DNA, 1080 bp, Artificial Sequence
  Optimized genes for Saccharomyces cerevisiae
atgggtgttgaacaaattttgaagagaaagaccggtgttattgtcggcgaagacgtacataacttgttcacttacgctaaagaacataagttcgctattcctgctatcaacgttactagttccagtacagctgtcgctgccttggaagctgctcgtgattctaaatctcctattatcttacaaacctctaacggcggtgctgcctactttgctggtaagggtatttctaacgaaggtcaaaatgcctcaatcaagggtgccattgccgctgctcactacattagatccatcgctccagcttacggaattccagttgtcttacactctgatcactgtgcgaaaaaactactaccctggtttgacggcatgttggaagctgatgaagcatatttcaaggaacacggtgaaccacttttttcctcgcacatgttggacttatccgaagaaactgatgaagaaaatatttcaacttgtgttaagtacttcaagcgtatggccgctatggaccaatggttggaaatggaaataggtatcacaggtggtgaggaagatggtgtcaacaacgaaaatgctgacaaggaagatttgtatactaagccagagcaagtgtataacgtttacaaagcattacatccaatttctccaaatttcagcatcgcagcagctttcggtaactgtcacggtttgtacgctggtgatattgctttgagaccagaaatcttggccgaacatcaaaaatacacgagggaacaagtcggttgtaaggaagagaagccactgtttttggtcttccacggtggttccggttctaccgttcaggaattccatactggtatcgataacggtgttgttaaagtgaacttggacactgactgccaatatgcctatttaaccggtatcagagactacgttctcaacaagaaggactacatcatgtctccagttggtaacccagaaggaccagaaaaaccaaataagaagttcttcgatcctagagtctgggtcagagaaggtgagaagacaatgggggccaagattactaagtctttggagacctttagaaccaccaacactttgtaa

SEQ ID NO: 4730 - DNA, 1005 bp, Artificial Sequence
  Optimized genes for Saccharomyces cerevisiae
atgttgtccagagttgccaagcgtgctttcagttccactgttgctaacccttacaaggttactgtcttaggtgcgggtggtggtattggtcaaccattgtctttattactaaagttgaaccacaaagtaactgacttgagactgtacgacttgaaaggtgctaagggtgtcgctactgatcttagccacattccaaccaattctgttgtcaaaggtttcaccccagaagaaccagacggtctcaacaacgctttgaaggacaccgatatggtcttgatccctgccggcgttccacgtaagccaggtatgacgagagatgatttgtttgcaattaatgcttctatcgttagagatttggccgctgctaccgcagagtctgctccaaacgctgctatcctagttatctcaaatccagtcaactctacagtcccaatcgttgctcaagtgttgaagaacaagggtgtttataacccaaagaagctatttggtgtcaccaccttggactctattagagctgccagattcatctcagaggttgaaaacacagatcccactcaagaaagagttaacgtcatcggtggtcacagcggcattaccatcattccattaatttcccagactaatcacaaattgatgtctgacgacaagaggcatgaattgatacatagaattcaattcggtggtgacgaggtcgtgaaggctaagaatggtgccggttccgctactctgtccatggctcacgccggtgctaaattcgccaacgctgtgctttccggttttaagggcgaaagagatgttatcgaaccttcttttgtagattctccattattcaaatccgaaggtatcgaatttttcgcatctccagttactttaggtcctgatgggattgaaaagattcatccgattggtgaattgtcgagtgaagaagaagaaatgttgcaaaaatgtaaggaaactttgaagaagaacattgaaaagggagtcaacttcgttgcctctaaataa

SEQ ID NO: 4731 - DNA, 597 bp, Artificial Sequence
  Optimized genes for Saccharomyces cerevisiae
atgtccgctatgatggtgaagctaggattgaacaaaagtgctttgttgctcaagccatccgccttctctcgtgctgccgctttgtcttcatctcgtagactattgttcaatactgccagaactaacttcttatccacctctccattgaagaacgttgcctctgaaatgaatactaaagctgctattgctgaagaacaaatcttgaacaagcagagagcgaagagacctatcagtccacacttaacaatctaccaaccacaattgacatggtacctgtcctctttgcatagaatttcattagtcttaatgggtttgggtttttacttgttcaccattttgtttggtgtttctggtctgttgggtttgggtttaaccactgaaaaggtctcgaactggtatcaccaaaaattttccaagattaccgaatggtctataaagggtagctttgcttacctattcgctattcattatggtggtgcaattagacacttaatctgggataccgctaaggagttgacgttaaaaggggtttacaggactggttatgctcttatcggcttcaccgccgttcttggtacttacttgttgactttgtaa

SEQ ID NO: 4732 - DNA, 744 bp, Artificial Sequence
  Optimized genes for Saccharomyces cerevisiae
atgccaaagttggttttagtgagacacggtcaatccgaatggaacgaaaagaacttattcactggttgggttgacgttaagttgagcgctaaggggcagcaagaagctgccagagctggtgaattattgaaagagaaaaaggtttatccagacgttctatatacctccaagttgtctagagctatccaaaccgctaacattgcattggaaaaggcagatagactatggatcccagttaacaggtcttggcgtcttaacgagcgtcattacggtgatttgcaaggtaaggataaggccgaaactcttaaaaaattcggtgaggaaaaatttaacacttacagaagatcctttgatgttccaccaccaccaattgacgcctcttctcccttcagtcaaaaaggtgatgaaagatacaagtacgttgaccctaatgtcttgcctgaaaccgaatcattggctttagtcattgatagactgctaccatactggcaagacgtcatcgctaaggacttattgtctggtaagacagttatgattgccgctcacggtaactcgttaagaggtttggtaaagcatttggaaggcatttccgatgccgatatcgctaagttgaatatcccaactggtataccattggtcttcgaactggacgaaaatctcaagccatctaaaccatcttattacttggaccctgaagctgccgctgctggagctgcggccgtcgcaaaccaaggtaagaagtaa

SEQ ID NO: 4733 - DNA, 249 bp, Artificial Sequence
  Optimized genes for Saccharomyces cerevisiae
atggtccttgttcaagatttgctacatccaaccgctgcatctgaagctagaaagcacaagttgaagactttggtgcaaggtccaagatcctacttcctggacgtcaagtgtccaggttgtttgaacattaccactgttttctctcacgctcaaactgccgttacctgtgaatcatgcagtaccatcttgtgtacacctactggtggtaaagctaaattatctgaaggtacttcctttagacgtaagtaa

SEQ ID NO: 4734 - DNA, 1026 bp, Artificial Sequence
  Optimized genes for Saccharomyces cerevisiae
atgcaatacaagaagtccctagtggcttctgccttagttgctaccagcttagccgcttatgccccaaaagacccatggtctaccctgactccatctgccacctacaagggtggtattactgattattctagtactttcggtattgccgttgaacccatcgccaccaccgcctctagtaaggctaagagagctgctgctatttcacaaattggtgatggtcaaattcaagcgactacgaaaacaacagccgctgctgtctcccaaatcggtgatggccaaattcaagctaccacaaagaccaaagctgctgccgtttcccaaatcggtgatggtcaaatccaagctaccactaagactacttctgctaagaccaccgcagcggctgtttcgcagattggtgacggtcaaattcaagctactaccaaaaccaaagccgctgctgtctctcaaattggtgacggtcaaatccaggcaactaccaagactacggctgccgctgtctcccaaataggagacggacaaatccaagcaactaccaagactactgctgctgctgtctcacaaattggggacggtcaaattcaagctacaactaacactactgttgcaccagtctcccaaatcacagacggtcaaatccaagccactactttgacttccgctaccattatcccaagcccagctccagcccctattactaatggtactgatccagtaacagcagaaacttgtaagtcttctggtaccttggaaatgaacttgaagggtggtattttgactgatggcaagggtcgtattggttctatcgttgctaatagacaattccaatttgatggtcctccaccacaagctggtgccatatacgccgctggttggtctatcactcctgaaggtaacttggctatcggtgaccaagacaccttctaccagtgcttatccggcaacttttacaacctttacgatgagcacatcggtacccagtgtaacgcagttcatttgcaagctattgatttgttgaattgttaa

SEQ ID NO: 4735 - DNA, 555 bp, Artificial Sequence
  Optimized genes for Saccharomyces cerevisiae
atggcgagatacggagctacttctactaacccagctaagagcgcctccgctagaggttcctatctaagagtttcctttaagaatactagagaaactgcccaagctattaacggttgggaattaaccaaggctcaaaaatacttggaacaagttttggatcatcaaagggctattcctttcagaagattcaactcttccatcggtcgtactgcacaaggtaaagaattcggtgttaccaaggcaagatggccagccaaaagtgtcaagtttgtacagggtttgcttcaaaacgccgctgctaatgccgaagctaaaggtttggacgccactaagttgtacgtttcgcacatccaagtcaaccaagccccaaagcagcgtagaagaacctatagagctcatggcagaatcaacaagtacgaatcttctccatcacacattgagttagtggtcaccgaaaaggaggaagctgttgctaaggcagccgaaaagaaagttgtcagactgacatctagacaaagaggtcgtattgctgctcaaaagcgtattgctgcttaa

SEQ ID NO: 4736 - DNA, 1284 bp, Artificial Sequence
  Optimized genes for Saccharomyces cerevisiae
atgagaaaatgcaagattttcgttggcaactcccatccagaactaggcaatatggtttgccaaagattgggtattgaaccagctccttgtacgttgaagaagttcgctaacggtgagacctctgtccaaatcggtgtctccgtcagagatgaagatgtttacgttattcagtctggatctccatccattaatgatgatatcatggaactattgattttggtttctgcttgtagaggtggttcagccaggaaaattactgctgttatcccccaatttccatactccaagcaatgtaaaatgaaaaggcaccgtggtgccataactgctagaatgttggctaacttgcttgtcatggctggggccgaccacgtggtctctatggacttacacgctagtcaaatgcaaggttttttcactaagccagtcgataacttgtatggtggtccatccttggctaagtggattcgtgaaaacgttgaagactacgaagatgcggtagtggtctctaagaacccaggtggtactaagagagttactgctttggctgattctctcaagattaacttcgccatgattcacaccgacagacgtagatcgaaggatttgtattctcaaaataaagatttgcaacagctgaagttaagaaagcaatcaatgttaagaaaaaacagaccaattatcagacaaggtgaccatccaaacgaagaggaaaacattatcttgtctaatggtatccaaaccgctagaatcagaaacggtcatgttatcggtgacgacgaagctgatgacgatgaagacgcaattttggaatccgacagcgaattacacagtattgacggcttagatagccatggtttaggtggtacttacgacgctgtcgactcggaagacgaagaggaaatcccagtgttgtacagagaacaattaattacattggttggaaacgtcagaggtagatctgcaatcattcttgatgacatgatcgatcgtccaggttcttttatctctgccgccgagcacttggttcaaaactgtggtgctaagaaggtttatgtcgttgcaacacatggtattttcaccggtgactgtttggaagaactagaaaagagtgacgctattgatactatcgttgttaccaatacctaccctatctccggtgaacgtattgctggttctaagaaactggttactatagatgtatcccctatcttcgctgaatgtatcagaagagatcactacggtgaatccatttctgtcttgtttgattcactagccgccttgtaa

SEQ ID NO: 4737 - DNA, 1098 bp, Artificial Sequence
  Optimized genes for Saccharomyces cerevisiae
atgaagttgtctgcgcttttggccttatctgcatctacagctgttttagccgctccagccgttcaccactcagacaaccatcatcacaacgacaagcgtgctgttgtcactgttacccaatacgttaacgctgacggtgccgtcgttattccagctgccacgaccgctacatctgctgccgcagatggcaaagttgaatctgtcgctgctgctactactaccttgtcttctaccgctgcagctgctactactagcgccgctgcttcatcttcgtcctcctcttcttctagttcttcttcttcatcctccgttgggtctggagacttcgaggatggtactatttcgtgttccgattttccttccggtcagggtgccgtctccctggactggttgggtttgggtggctgggcttcaatcatggatatgaacggtaataccgctacatcctgccaagatggttactactgtagctacgcttgttccccaggttacgctaagactcaatggccatccgaacaaccttctgatggtagatccgttggtggtttgtactgtaagaacggcaagttgtatagatctaataccgatactaattctttgtgtgttgagggtcaaggtagtgctcaagctgtcaacaaggtttctggttccatcgcaatctgcggcactgactatcctggttccgaaaacatggttgttccaaccgtcgttggtgccggttcaagccaaccaattaatgtaattaaggaagatagttactaccaatggcaagggaaaaaaacctccgcccagtactatgtgaacaatgctggtgtctccgttgaagatggttgtatttggggaaccgaaggttctggtgtcggtaactgggctccagtagtcttaggtgctggttacactgacggtattacttatctaagtattatcccaaaccccaataataaggaagccccaaacttcaacatcaagatagttgccactgacggttctactgtcaacggtgcttgtagctatgaaaacggtgtgtactctggttccggttctgacggttgtaccgtgagtgtcacatctggttctgcaaacttcgttttttactaa

SEQ ID NO: 4738 - DNA, 264 bp, Artificial Sequence
  Optimized genes for Saccharomyces cerevisiae
atggaaaacgataagggccaattggtggaattgtatgtcccaagaaagtgttccgctaccaacagaattattaaggccgatgatcacgcttcagttcaaatcaacgttgccaaggttgatgaagaaggtagagctatcccaggtgagtacgtcacttatgcattgtctggttacgtaagatccagaggtgaatctgacgactctttgaatagactagctcaaaacgacggtttgttaaaaaatgtctggagctacagtcgttaa

SEQ ID NO: 4739 - DNA, 1920 bp, Artificial Sequence
  Optimized genes for Saccharomyces cerevisiae
atgagtaaagctgttggtatcgatttgggtactacttactcttgcgttgctcacttttccaatgacagagtcgacatcatcgctaatgaccaaggtaacagaactaccccttccttcgttggctttaccgacaccgagaggcttatcggcgatgctgccaaaaaccaggctgctatgaacccagccaacacagttttcgatgctaagagattaatcggtagaaacttcaacgatccggaggtccaaggcgatatgaagcatttcccattcaagttaattgacgttgatggtaagccacaaatccaagttgaattcaaaggtgagactaagaacttcaccccagaacaaatctcttctatggttttggggaagatgaaggaaactgccgaaagctacttgggtgctaaggttaacgatgcagttgttacagttccagcttacttcaatgatagccaaagacaagctaccaaggatgctgggactatcgctggtttaaacgttttgcgtattatcaatgaaccaactgccgccgctattgcatacggtttagataagaagggtaaagaagagcatgtcttgatcttcgacttgggaggtggtactttcgatgtgtctctgttgtctattgaagacggtatttttgaagtcaaggctaccgctggtgatacccacttgggtggtgaagatttcgacaatagactggttaaccactttattcaagaattcaagcgtaagaataaaaaggacctctccactaatcaaagagctttaagaagattgagaaccgcctgtgaaagagctaagagaaccttgtcttctagcgctcaaacctctgtcgaaatcgactcgctttttgaaggtatcgatttttacacttcaattactagagctagatttgaagaattgtgtgcagacttgtttcgttctaccttggatccagtcgaaaaggttttgagagatgctaagttagacaaatcccaagttgacgaaattgtgttggtcggtggttccactagaatccctaaggtacaaaagttggttaccgattatttcaacggtaaggaaccaaacagatctattaatccagacgaagctgtagcttacggtgctgctgtccaagctgctattctaaccggtgatgaatcttccaagactcaggatcttttgttattggacgttgctcctttgtctctaggtattgaaaccgccggtggtgtcatgactaagttgatcccaagaaactccacgattccaacaaagaagtccgaagttttctccacttatgctgacaatcaaccaggtgtgttaattcaagttttcgagggtgaacgtgctaagacaaaggacaacaatctgttgggtaaattcgagctatctggaattcccccagcaccacgtggtgtcccacaaattgaagtcactttcgacgtcgactccaacggtattctaaacgtttctgctgtcgaaaagggcactggtaaatcgaacaaaattactataacaaacgacaaaggcagattatcaaaggaagatattgaaaagatggtagcagaagccgaaaagttcaaagaagaagatgaaaaggaatctcaaaggatcgcttctaaaaaccaattggaaagtattgcttattccttaaagaacaccatctcagaagccggagacaaactagaacaggctgataaagacgctgttactaagaaggccgaagaaactatagcctggttggactcaaacactacggccaccaaggaagaatttgatgaccaattgaaggaattgcaagaagtggctaacccaatcatgtctaaattgtaccaagccggtggtgcaccagaaggtgcggcgccaggtggttttccaggtggtgccccccctgccccagaggccgagggtcctacagtcgaggaagtcgattaa

SEQ ID NO: 4740 - DNA, 801 bp, Artificial Sequence
  Optimized genes for Saccharomyces cerevisiae
atgttgaacgtcttgttgagaagaaaggccttttgtttagtgaccaagaagggtatggcgacagctactactgctgctgctactcacactccaagattgaagacttttaaagtttacagatggaacccagatgaaccaagtgcaaagccacacttgcagtcttaccaagttgacttgaacgattgtggtccaatggttcttgacgccttgttaaaaatcaaggatgaacaagactctaccttaactttcagacgttcatgtagagaaggtatttgcggctcatgtgctatgaacattggtggtagaaacacgttagcttgtatctgtaagattgatcaaaatgaaagcaagcaactaaagatttacccactaccccatatgttcatagtcaaggatttggtacctgacttgaccaacttctaccaacaatacaaatccatccaaccatacctccaaagatcttcgttcccaaaggacggtaccgaagttttgcaatctattgaagaccgtaagaagctagatggtctgtatgagtgtattctttgcgcctgctgttctacttcctgtccttcctactggtggaaccaggaacaatatttgggtcctgcagtcttgatgcaagcttacagatggttgatcgactctagagatcaagctacaaaaaccagaaaggccatgttaaacaattccatgtctttgtataggtgtcatactattatgaattgtactcgtacctgtccaaaaggattaaatccaggtttggctatcgccgaaatcaaaaagtccttggctttcgcttaa

SEQ ID NO: 4741 - DNA, 771 bp, Artificial Sequence
  Optimized genes for Saccharomyces cerevisiae
atggctccaggtaaaaaagttgctccagctccattcggtgctaaatccacaaaatctaacaaggcgaaaaatcctttgactcattctacaccaaagaactttggtatcggtcaagccgttcaacctaagagaaacttgtctagatacgttaaatggccagaatatgtccgtctacaaagacaaaagaagattcttagcattcgtttaaaggtgcctcccactatcgcccaattccagtatactttggataggaacactgctgcagaaaccttcaagttgttcaataaatacagaccagaaactgctgctgaaaagaaggaaagattgaccaaggaagccgctgctattgctgaaggtaagtcgaagcaagatgcctctccaaagccatacgctgtgaagtacggtttgaatcacgttgttagtttgatcgaaaacaaaaaagctaagttagtcttgattgctaacgacgtcgacccaatagagttggttgtatttttgccagccttgtgtaagaaaatgggtgttccatatgccatcatcaagggtaaagctagactaggtacgttagtcaatcaaaagacctccgctgttgcagcattaaccgaggttagagcagaagacgaagctgctttggctaagttggtctctactattgatgccaactttgccgacaagtacgatgaagtcaagaagcactggggcggtggtattctgggaaacaaggcccaagccaagatggataagagagctaagacttcagactccgcttaa

SEQ ID NO: 4742 - DNA, 432 bp, Artificial Sequence
  Optimized genes for Saccharomyces cerevisiae
atgtccagatctggtgtcgccgttgctgacgagtctttgactgcttttaatgatttaaagttgggtaagaagtacaaattcatcttgtttggtctgaacgatgctaagaccgaaatcgttgttaaagagacatccactgatccatcatacgacgccttccttgaaaagctaccagaaaacgactgtttgtacgccatttacgatttcgaatatgaaattaacggtaatgaaggtaagagatctaagattgtctttttcacttggtcgcctgacaccgctccagttagatcaaaaatggtctatgcatcctctaaggatgctttacgtagagctttgaacggcgtctctaccgacgttcaaggtactgacttcagtgaagttagctacgattctgtgttggaaagagtatctagaggagctggttcccactaa

SEQ ID NO: 4743 - DNA, 3618 bp, Artificial Sequence
  Optimized genes for Saccharomyces cerevisiae
atgagaacctttaccgatttcgtttctggtgcccccattgttagaagtttacaaaagtccaccattagaagatacggttacaatttggccccccatatgtttttgttgttacacgttgatgaattgagtatcttctccgcttatcaagcctcattgccaggcgaaaagaaggtagacacagaaagattgaaaagagacttgtgtccacgtaagcctattgaaatcaagtacttctctcaaatatgtaacgatatgatgaacaagaaggatagactaggtgatgtattagctactgcccaaagaattagaagaagatacaataagaacgggtcatccgaaccaaggctgaagacattggatggtctcacttctgaacgttggatccaatggttgggtttggaatctgattatcactgctctttttcctctactagaaatgctgaagatgtagtcgctggtgaagctgcctcatccgatcacgatcaaaaaatttccagagtcactagaaaacgtccacgtgaacctaagtcgactaacgacattttggttgctggtcaaaaattatttggttcttctttcgaattcagagatttgcaccaattgagattgtgtcacgagatctatatggccgatacccctagtgtcgctgttcaggctccaccaggttacggtaagactgaattgtttcatttaccgttgatcgctctcgcttccaagggcgacgttaagtacgtttctttcttgttcgtaccttacactgtcttactggcaaactgtatgattagacttggtagatgcggttgtttgaacgttgctccagtaagaaattttatcgaggaaggttgcgacggtgtcaccgacttatacgtcggtatctacgacgacttggccagtaccaacttcactgaccgtattgctgcttgggaaaacattgtggaatgtacctttagaacgaacaatgttaagttaggttatcttatagttgacgaattccacaactttgagacagaagtgtatagacaatcgcaattcggaggtatcactaacttggatttcgacgctttcgaaaaagccatcttcctatccggtactgctccagaagctgttgcagacgctgcattgcagaggattggtttgactggtttggccaagaaatctatggatatcaatgaattgaagagatccgaagacttgtctagaggtttatcttcctatccaactagaatgttcaacttgatcaaagaaaaatccgaagttcctttgggtcatgtccataagatttggaagaaggttgaatcccaaccagaagaggccttaaagttgctgttggctcttttcgaaatcgaaccagaatctaaagctattgtcgtggcgtctaccactaatgaagttgaagaattggcttgctcctggagaaagtacttcagagtcgtttggatccacggcaagctgggtgctgctgaaaaagtttctagaaccaaggaatttgtcaccgacggttccatgagagttttaatcggtactaagttggtcactgaaggtattgatatcaagcaattgatgatggtcatcatgttagataacagattgaatattatcgaattgatccaaggggttggtcgtttaagagacggtggcctatgttatttattgtctagaaagaattcctgggccgcaagaaacagaaaaggtgaattaccaccaattaaagaaggttgtattaccgaacaagtcagagaattttacggtctagaatccaagaagggtaagaaaggacagcatgtgggttgttgtggcagtagaaccgacttgtctgctgacaccgttgaattgatcgaaagaatggacagattggctgaaaagcaggctaccgcgtcgatgtccatcgtcgccttgccatcctctttccaagagtctaactcatctgaccggtgtcgaaagtactgttcatccgatgaggattctaacacatgtattcatggttccgctaacgcttcaaccaacgccacaactaactctagcaccaatgcaactaccacggcttctactaacgtgagaactagcgctaccactactgcaagcattaacgtcaggacttccgctactactaccgaatctactaactcttcaaccaacgctactaccactgcctctactaacgtcagaacctcagctacaactaccgcttctattaacgttagaacttctgccactactactgagagtacaaacagcaatacttctgccaccaccacagaatctaccgattcgaacacttctgctactacaactgagtctaccgactctaacactagtgctacgaccaccgcttctaccaactcctctactaacgccaccacaaccgcttctactaactcatctaccaatgctacaaccactgaaagcaccaacgcttctgccaaggaagatgcaaacaaagacggtaacgccgaagataaccgtttccacccagttactgacattaacaaggaatcttacaagagaaaaggtagccaaatggttttgttggaaagaaaaaagctaaaggcccaattcccaaacacgtccgagaatatgaatgttttgcaattcttgggttttaggtccgatgaaattaagcacctattcttgtatggtattgatatttacttttgtccagaaggtgtctttactcaatacggtttgtgtaaaggttgtcaaaagatgtttggattatgcgtttgttgggctggacaaaaagtctcctacagaagaatggcctgggaagccttggctgttgaaagaatgttgcgtaacgacgaagagtataaggaatacttggaagacatcgaaccataccatggtgatccagtgggttacctaaagtttttctctgttaagagaggtgaaatctattcccaaatccaaagaaattacgcttggtacctggctattactcgtagacgtgaaactatctctgtcttggatagtacaagaggtaagcaaggttcccaagttttccgtatgtccggtagacagattaaggaattatattacaaggtttggtcaaatcttcgtgaatctaagaccgaagttctgcaatacttcttgaactgggacgaaaagaaatgtcgtgaagaatgggaagcaaaggatgacactgttttcgtcgaggctttggagaaggtcggtgtctttcaacgtttgagatcgatgacctctgctggtttacaaggtccacaatacgttaaattgcaattctctcgtcaccatcgtcaattgagatctcgctatgaactaagcttgggtatgcatttgagagatcaattggctttaggtgttacaccatcaaaggttccacactggactgctttcttatccatgctaattggtttgttctacaataagactttcaggcaaaaacttgaatacttattagaacaaatttctgaagtttggcttctacctcactgggttgatcttgcaaacgtcgaggttctagctgccgataacactagagtgccattgtacatgttgatggttgctgtccacaaggaattggattccgacgatgttcctgacggcagattcgacattatattgttgtgtagagactcctctagagaagtcggtgagtaa

SEQ ID NO: 4744 - DNA, 252 bp, Artificial Sequence
  Optimized genes for Saccharomyces cerevisiae
atggctgaccaagaaaactctcctttgcacaccgttggtttcgatgctagatttccacagcaaaatcaaactaagcattgttggcaatcctatgttgattaccacaagtgtgtcaacatgaaaggtgaagactttgcaccatgcaaggttttctggaagacttacaacgccttatgtccattggactggatcgagaaatgggatgatcaaagagaaaagggtattttcgctggtgacattaactctgattaa

SEQ ID NO: 4745 - DNA, 312 bp, Artificial Sequence
  Optimized genes for Saccharomyces cerevisiae
atggttactcaattcaagacagcgtctgagttcgactctgctatcgctcaagacaagttagttgtcgtcgatttttacgcaacctggtgtggtccatgtaaaatgattgctccaatgatcgaaaagttttccgaacaatatccacaggccgatttctacaagctagatgtcgatgaattgggtgacgttgctcaaaagaacgaagtttctgccatgccaactttgttgttgttcaagaatggtaaagaagtggccaaggttgtaggtgctaaccctgctgctattaaacaagcaattgccgctaacgcttaa

SEQ ID NO: 4746 - DNA, 1692 bp, Artificial Sequence
  Optimized genes for Saccharomyces cerevisiae
atgtctgaaattacccttggtaagtatttatttgaaagattaaagcaagttaacgttaacactgtttttggactaccaggtgacttcaacttgtctttgctagacaagatctacgaagtggaaggtatgagatgggccggtaacgccaatgaattgaacgccgcttacgctgctgatggttatgccagaatcaaaggtatgtcatgcattatcacaacctttggagtaggcgaattgagcgctttaaacggtattgctggttcctacgctgagcacgttggggtacttcatgttgttggtgttccatccatctccgctcaggctaagcaattgttgctgcaccataccttgggtaacggtgactttactgtcttccacagaatgtctgctaacatttctgaaactaccgctatgattactgatattgctactgcaccagctgaaattgatagatgtatccgtacaacttacgttacccaaagaccagtttacttaggtttgccagctaacttggttgacctaaacgtgccagctaaattgttacaaactcctattgacatgtccctaaagccaaacgatgctgaatctgagaaggaagttatcgatactatcttggctttggttaaggacgctaagaatccagtcatcttagctgacgcatgttgtagtagacatgatgtcaaggcagaaactaagaaattgattgatttgactcaattccctgcgttcgttaccccaatgggtaaggggtcaatcgatgaacaacacccaagatacggcggcgtctatgttggtaccctttccaagccagaagttaaggaagccgttgaatctgctgatttgatcttgtctgtcggtgctttgctgtctgacttcaacactggtagtttttcctattcttacaagaccaagaacattgtcgagttccattcggatcatatgaagatccgtaacgccaccttccctggtgtccaaatgaagttcgtgttgcaaaagctattgactaccatcgctgacgctgccaaaggttacaagcctgtcgccgtcccggcccgtacaccagcgaatgctgcagtgccagcctctactccattgaaacaagaatggatgtggaatcaattgggtaacttcttgcaggaaggtgatgtagttattgctgaaactggtacctctgcattcggtattaatcaaacgactttccctaacaatacatatggtatttcccaagttttgtggggttctatcggctttactacaggtgccacgttgggtgccgccttcgctgccgaagagattgatccaaaaaagagagtcattttgtttattggtgacggttctctccaactgactgtccaagaaatctccactatgatcagatggggtttaaaaccatacttgtttgtcttgaacaacgacggttacactatcgagaagttgatacacggtccaaaagctcaatacaatgaaattcaaggttgggaccacttatcattgttaccaaccttcggtgctaaagattacgaaacccacagggtcgctactaccggtgaatgggacaaattgacacaagacaagtctttcaatgataacagcaagattagaatgattgaaataatgttaccagttttcgatgcaccccaaaacttagtcgaacaagctaagttgactgctgccaccaatgctaagcagtaa

SEQ ID NO: 4747 - DNA, 1098 bp, Artificial Sequence
  Optimized genes for Saccharomyces cerevisiae
atggacttggttttggaagtcgccgaccattatgttttggatgatttatatgccaaggtcttgccagcctctctagcggctaacatcccagtaaaatggcaaaaattgttgggacttaactctggtttttctaattctaccatcttgcaagaaaccctaaacagtaagaatgctgttaaggaatgccgtagattttacgggcaagtgccattcttgttcgatatgtcaacaacttcttttgccagcttgttgccaagatcctctattttgagagaattcttgagtttgtgggtcattgtcactatttttggcttgttactatacttatttactgcttctttgtcctacgtctttgtattcgacaagtctattttcaaccaccccagatacttaaagaaccaaatggcaatggaaattaaactggctgtctctgccatcccatggatgtcgatgttgaccgttccatggtttgttatggagttaaatggtcactccaagttgtatatgaagatcgattacgaaaaccatggtgtcagaaagttaatcattgaatacttcacttttattttcttcaccgattgtggtgtttatttggcacacagatggctgcactggccaagggtttatagagctcttcataagcctcatcataaatggttggtttgtactccattcgcttcccattccttccacccagttgacggtttcttgcaatctatcagctatcatatttacccattgatacttcctctacataaggtttcttacctcattttgttcaccttcgtcaacttttggaccgttatgattcacgatggtcaatacttgtccaacaatcctgctgttaatggtacagcttgtcacacggtccaccacttgtacttcaactacaactacggtcaattcactactttgtgggatagattaggtggttcctaccgtagaccagatgattcattattcgaccctaaattacgtgacgctaaggagacttgggacgctcaggttaaagaagttgaacacttcatcaaggaagtggaaggtgacgacaacgacagaatctacgaaaacgatccaaacactaagaagaataactaa

SEQ ID NO: 4748 - DNA, 1788 bp, Artificial Sequence
  Optimized genes for Saccharomyces cerevisiae
atgcctaccgtctctgttaataaacaacaattgtttgatttgttaggtaagaactacaccagccaggaatttgatgaattatgtttcgaattcggtatggagatggatgaagacaccacggaagaagccttgaagacaggtgaagaaccagagttaaagttggacatttccgctaacaggtatgatttactttgtattgaaggtatctcgcaaagtcttaacgaatacttggagagaaaagaacgtcctgactacaagttgtcgaagccaactaccaagttgattattgacaaatctactgaacagattagaccattcgctacagctgccgtattgagaaacattaagttaaacgaaaagtcctatgcgtcttttatcgctttgcaagataagctacacgctaacttgtgtagaaatagatctttagtcgctatgggtactcatgacttggattctatcgaaggtccatttcactaccgtgcattgccaccaaaggacatcaaattcgtcccactcaatcaaactcaagaattcaccggtgacaagctaattgaattttacaagtctccagagcaaaagaacaacattggtagatacgtgcatattattgaagactctccagtcttccctgttatcatggatagtaaggatagagtttgttctttaccacctttgatcaattccgagcactcaaaaatttcagtgaacaccagaaatatcttgattgacattactgccactgacaaaacaaaggcagaaattgttttgaacatcttgaccactatgttttccagatattgtgacgaacctttcactgtcgaaccggtagaaattgtctctgaacacaatggtcaaagcagactggctccaaacttcaatgatcgtattatggacgtctctataaagtacattaactcctgcttaggtctggatcaatctgctgacgaaattgcccactgcttgaaaaagatgtctttgcatgctgttcaatccaaggaagataaggacattctacacgttgacatacctgttactagaccagatattttgcacgcctgtgatatcatggaagatgccgctgtcggttacggtttcaacaacttgccaaaaggtgaaaagcttagtaacgctaatttcattgctaaacccttgccaattaacaaggtttccgatatctttagagttgcttcttctcaagctacttgggttgaagttttgccactgactttatgttcccatgacgaaaattttaagttcttgagacaatcagacaacggagatctagctgtcaagttggctaacccaaagaccttggaatatcaagtcgtgagaaccacattgttgcccggtatcctaaaaactgttaaagaaaaccgtaagcactccttgccaatcaaggttttcgaaactggtgacgttgtcttcaaggatgataagttggaaagaaaggcctacaacgaaagacattgggctgccatctatgttggtaagaattcaggtttcgagatcatccaaggtttgttaggtaagatcatgcaaaccttcagaaccgaatggatcgctgattacggtgctgccgcttccggccgtggttactggatcgaagaagatgactctgtgaaaacttacttcccaggtaggggtgctaaggtcatgtttagatccaaagaaggggccgagccaaagcaaatcggccatctaggcgtcttacatccagaggttatgatgaactttgacgttccattcgcagcttctttcgttgaagtaaacgcagaagttttcttgtaa

SEQ ID NO: 4749 - DNA, 366 bp, Artificial Sequence
  Optimized genes for Saccharomyces cerevisiae
atggcccctaatactagtcgtaagcaaaagattgctaagacttttacggttgatgtctcttctccaactgaaaacggtgtttttgacccagcctcttacgctaagtacctaatcgaccacatcaaggttgaaggtgctgttggtaacttgggtaacgctgtcactgttacagaagatggcaccgtcgttaccgtggtatccacagctaaattctcaggtaagtacttgaagtacttaactaaaaaatatttgaagaagaatcaattgagagattggattagattcgtctccaccaaaactaacgagtacagattggcattctatcaagttaccccagaggaagacgaagaagaagatgaagaataa

SEQ ID NO: 4750 - DNA, 666 bp, Artificial Sequence
  Optimized genes for Saccharomyces cerevisiae
atggccagaagacctgccagatgttatagatatcaaaagaacaagccatatccaaagtccaggtacaaccgtgccgttccagactctaagatccgtatctacgatttgggtaaaaaaaaagctacagttgacgaatttcctttgtgtgtacacttggtgtccaacgaattggaacaattatctagtgaagcattggaagctgctcgtatttgcgctaataagtacatgactaccgtctcaggaagagatgcttttcatctgagagttagagtccacccctttcatgtcttgagaattaacaagatgttgtcttgtgcgggtgctgatagattacaacaaggtatgagaggcgcttggggtaagccacacggtctagctgctagagtcgacattggtcagattattttctccgttagaaccaaagacagcaacaaagatgttgttgtcgaaggtttaagaagagctagatacaagttcccaggtcaacaaaagatcatcttgtcgaaaaagtggggttttactaaccttgatagaccagaatacctaaagaagcgtgaagctggtgaagttaaggatgacggggctttcgttaagttcttgtctaagaagggttctttggagaataatattagagaattcccagagtacttcgccgcccaagcataa

SEQ ID NO: 4751 - DNA, 531 bp, Artificial Sequence
  Optimized genes for Saccharomyces cerevisiae
atgtccgacttggttaacaagaaattcccagccggtgactacaagtttcagtacattgctatctctcaatctgatgctgattctgaatcatgcaaaatgcctcaaactgttgagtggtcgaaattaatctccgaaaacaagaaggtcatcatcacaggtgctccagcagccttctccccaacttgtactgtttctcacattccaggttacattaattatttagatgaattggttaaggaaaaggaggttgaccaagtgattgtcgttaccgtcgataacccttttgccaaccaagcttgggcgaagtccttgggcgttaaagacactacacacataaagttcgctagtgatccaggttgtgctttcactaagtctatcggtttcgaattggctgtcggtgatggtgtttactggagcggtagatgggccatggtggtcgaaaacggtattgttacctatgcagctaaggaaaccaatccaggaactgacgtcacggtttcttcagtcgaatccgtactagctcatttgtaa

SEQ ID NO: 4752 - DNA, 402 bp, Artificial Sequence
  Optimized genes for Saccharomyces cerevisiae
atgcaattcagcacagttgcttcaattgcagcggtagctgccgtcgcttccgccgctgccaatgttaccactgctacggtctcccaagagagtactactctagtgactattacctcttgtgaagaccacgtttgctctgaaactgtttctccagcattggtctccaccgccaccgtcaccgtcgatgatgttatcacacaatatactacctggtgtccattgactaccgaagcaccaaagaacggtacttctaccgccgctccagttacttccactgaagcccctaaaaacaccacatctgctgctccaactcattctgttacttcgtacactggtgctgctgctaaggctttaccagccgctggtgctttgttggctggtgccgctgctttattgctttaa

SEQ ID NO: 4753 - DNA, 822 bp, Artificial Sequence
  Optimized genes for Saccharomyces cerevisiae
atgtctaatccattcgacttgttgggtaacgacgttgaagacgccgatgtcgtcgttttgcctcctaaagaaatcgttaagagtaacacttcatctaagaaggccgatgttccaccaccatccgctgatccctcgaaggctagaaaaaacagaccacgtccttctggcaacgagggtgccattagagacaagaccgcaggtagaagaaacaaccgttctaaggacgtcactgatagcgctactactaaaaaatctaataccagaagggccactgatagacactctagaaccggtaagaccgatacaaagaagaaggtcaaccaaggttggggagatgacaaaaaagaattgagtgctgaaaaggaagctcaagcggatgctgctgcagaaattgctgaggatgctgctgaagccgaagacgctggtaagccaaagactgcccagctttccttgcaagattacttaaatcaacaagctaacaaccaatttaacaaggtcccagaagcaaagaaggtggaattggatgctgaaagaattgaaacagccgaaaaggaagcttacgttccagctaccaaggttaagaacgttaagtccaaacaactaaagaccaaagaatatttggaattcgacgccacttttgttgagtctaacacgagaaagaacttcggtgacagaaataacaattctagaaacaacttcaataaccgtagaggtggtagaggtgcccgtaaaggtaacaataccgctaatgctactaactccgctaacactgtacaaaagaacagaaacatcgacgtttcaaatctgccatccttagcttaa

SEQ ID NO: 4754 - DNA, 1089 bp, Artificial Sequence
  Optimized genes for Saccharomyces cerevisiae
atgagatccttgaatacattgttattgtcattgttcgtggccatgtcttcaggtgctccgttgctaaagattagggaagagaaaaactcttctttgccatccatcaagatcttcggtactggtggtaccatcgcatctaagggttccacttctgcgactaccgctggttactcagtcggtttgacagttaatgatttaattgaagctgttccttctttagctgaaaaagctaatttagactatttgcaagtatctaacgttgggtctaactctttgaactacactcatttgattccattgtaccacggtatctcagaagccttagcttccgacgattatgccggtgccgttgtcacccacggtaccgatactatggaagaaaccgccttttttctggatcttactatcaactctgagaagccagtttgtatagctggtgctatgagaccagctaccgcaacctccgctgatggaccaatgaacttgtaccaagccgtttctattgccgcctctgaaaagtctctaggccgtggtacaatgattactttgaatgatagaattgcttccggtttctggaccactaagatgaacgctaactcgttggacactttcagagctgatgaacaaggttacttgggttactttagcaacgacgacgtcgaattttactacccaccagtcaagcccaacggttggcaattcttcgacatttctaacctgactgacccatccgaaatcccagaagttattattttatactcttatcaaggtttgaacccagaattgattgtcaaagccgttaaggatttgggcgctaaaggtattgtcctagcaggtagtggtgctggttcgtggactgctacgggctccatcgttaacgaacaattgtatgaagaatacggtattccaattgttcatagtagaagaactgctgacggtaccgttcctcctgatgacgctcctgagtacgctatcggttccggttatcttaatccacaaaagtctcgtatcctactccaattatgtttgtatagcggttacggtatggatcagatcagatccgtgttcagtggtgtctacggtggataa

SEQ ID NO: 4755 - DNA, 459 bp, Artificial Sequence
  Optimized genes for Saccharomyces cerevisiae
atgcaaatcttcgttaagaccttgactggtaagacaattaccctggaggttgaatcttccgatactattgataacgttaagtctaagattcaagacaaagaaggtattcctccagaccagcaaagattgatctttgctggcaagcaacttgaagacggtcgtactttgagtgattataacattcaaaaggaaagcaccttacacttggtcttgaggttacgtggtggaggtaaaaagagaaaaaagaaagtatacactactccaaaaaagatcaagcataagcacaagaaagtcaagttggccgttttgtcttactacaaggtggacgctgaaggtaaggttaccaagttaagaagagaatgctcaaatccaacttgtggtgccggtgtcttcttggcaaaccacaaagatagactatattgtggtaagtgtcattccgtttacaaggtcaacgcttaa

SEQ ID NO: 4756 - DNA, 267 bp, Artificial Sequence
  Optimized genes for Saccharomyces cerevisiae
atgggaaagggtactccatcctttggtaagagacataacaaaagccacactttgtgcaacagatgtggtcgtagaagtttccacgtccaaaaaaaaacctgttcatcctgtggttacccagccgctaagactagatcttataattggggtgccaaggcaaagagaagacacaccaccggtactggtagaatgagatacttgaagcatgtttccaggcgtttcaagaacggcttccaaacaggttctgcttctaaggcttctgcttaa

SEQ ID NO: 4757 - DNA, 3135 bp, Artificial Sequence
  Optimized genes for Saccharomyces cerevisiae
atgtcagactcccaacaatccatcaaagtcttagaagaactgttccaaaaattgtctgttgctaccgctgataacagacatgaaattgcttccgaagttgcttctttcttgaacggtaatattattgaacatgacgttcccgaacatttctttggcgaattagccaagggtatcaaggacaagaagaccgccgccaacgccatgcaagccgttgcccacattgccaaccaatctaatttgtccccatctgttgaaccatacattgtgcaattggttcctgccatctgtaccaacgctggtaataaggataaggaaatacaatctgttgcctctgaaacattgatctccatcgtcaacgctgtcaacccagttgctattaaggctttgttgccacacttgacaaacgctatcgtggaaactaacaagtggcaagaaaagatcgctattttggctgctatttctgctatggtagatgctgccaaggatcaagtcgctttacggatgccagaactgatacctgttttgtctgagactatgtgggataccaaaaaggaagttaaggctgctgcaactgctgcgatgaccaaagctacggaaaccgttgacaacaaagatattgaaaggtttatcccaagcttgatccaatgtattgccgatccaactgaagtcccagaaaccgtccatttgttgggagctactacgttcgtagctgaagttaccccagccactcttagcatcatggtcccattgttgagtagaggtttaaatgagagagaaaccggtattaagcgtaagtcggcagttattattgataatatgtgtaaattagttgaggacccacaagtgattgctcctttcctaggtaagcttttgccaggtctgaagtctaacttcgctaccattgccgacccggaggctagagaagtgacattaagagctttgaaaactttgagaagagtaggtaacgttggtgaagatgatgctattcctgaagtttcccacgccggtgacgtgtctactactttgcaagtcgtgaacgagttattgaaggacgaaaccgttgctccaagattcaagatcgtcgttgagtacattgcggccattggggctgatttaattgatgaaaggatcattgaccagcaagcctggttcacccatattactccatacatgaccatttttctacatgaaaagaaggcaaaagatattctagatgaattcagaaaaagagcagttgataacatcccagttggcccaaactttgacgacgaagaagatgaaggtgaagatttgtgcaactgcgaattttctttggcctatggtgctaagatcttgctgaataagacccaattgcgtttgaagcgcgctagaagatacggtatttgtggtcccaatggttgtggtaagtctactttaatgcgtgctatcgctaacggtcaagtcgacggttttcctactcaagaagaatgcagaaccgtctatgtcgaacatgacattgatggtactcactccgacacatccgtcttggatttcgtcttcgaatccggtgttggtaccaaggaagccatcaaagacaagcttatcgaatttggttttactgacgaaatgatcgctatgccaatctctgctttgagtggtggttggaaaatgaagttggccctagcccgtgctgtcttgagaaatgctgatatactgttgctcgacgaaccaactaaccacctagacactgttaatgtcgcatggttggtcaattatttaaacacttgtggtatcacctccatcacaattagtcatgactccgtgtttctagacaacgtttgtgaatacattatcaactacgaaggtttgaagctaagaaagtataaaggcaacttcactgaatttgtcaagaaatgtccagctgctaaggcttatgaggaactatccaacaccgacttggaattcaaatttccagagcctggctacttggaaggcgttaaaactaagcaaaaggctattgttaaggttactaacatggagttccaatacccaggtacttctaagccacagattaccgatatcaatttccaatgtagcttatcgtcacgtattgctgttatcggtcctaatggtgctggtaaatctaccttaattaacgttttaacaggtgaattattaccaacatctggtgaagtctacactcacgagaactgtagaattgcttacatcaagcaacacgccttcgctcacatcgaatctcacttggataagaccccatctgaatacattcaatggagattccagactggtgaggaccgtgaaactatggacagagcaaacagacagatcaacgaaaatgatgctgaagctatgaataagatctttaagatcgaaggtacccctagaagaattgcaggtatacacagtagaagaaaattcaagaacacttatgaatacgagtgttctttcttgttaggtgaaaacattggcatgaaatctgaaagatgggtcccaatgatgtccgtcgataatgcatggatcccacgtggtgaacttgttgagtctcatagtaagatggtagctgaagtcgacatgaaggaagccttggcatccggtcaattcagaccacttactagaaaggagatcgaagaacactgttcgatgttgggtttggacccagaaattgttagccattctagaattcgtggtttgtccggaggtcaaaaggttaaattggttttagcggcaggtacttggcaaagaccacacttgattgtcttggatgaaccaactaactacctcgaccgtgactcattaggagccttgtcaaaggctttgaaggaattcgaaggtggtgttatcattattactcactcagctgaattcactaagaacttgacagaggaagtctgggctgtaaaggacgggagaatgacgccttctggtcacaactgggtttccggtcaaggagctggtccaagaatcgaaaagaaggaagatgaagaagataagtttgatgctatgggtaacaaaatcgctggtggtaagaagaaaaagaagttgtcttctgccgaattgagaaagaagaaaaaggaaaggatgaaaaagaaaaaggaactaggtgatgcctacgtttcatctgatgaagaattctaa

SEQ ID NO: 4758 - DNA, 1719 bp, Artificial Sequence
  Optimized genes for Saccharomyces cerevisiae
atgttgagatcttctgtcgtccgttccagggccactttgagaccattattgaggcgtgcttactcctctcataaggagttgaaattcggtgtcgaaggtcgcgctagccttttgaagggtgtcgaaaccttagctgaagctgtggctgctaccttgggtcctaagggtcgtaatgttttgatagaacaaccttttggtccaccaaagatcaccaaggatggtgtcaccgtcgctaagtcaattgtcttgaaggacaagtttgaaaacatgggggctaagctattacaggaagttgcctctaagacaaacgaagccgcaggtgatggtactacctctgcaactgttcttggtagagctattttcacggaatcagttaagaacgttgctgcaggttgtaacccaatggacttacgtagaggctctcaagtcgctgttgaaaaggtcatcgaattcttgtccgctaacaaaaaggagattactacttcagaagaaatcgctcaagtagcgactatttccgccaacggtgactctcacgtcggtaaattgttggctagtgctatggaaaaagtaggtaaggagggtgttattactattagagagggcagaactttggaagacgaattggaagttactgaaggtatgagattcgatagaggtttcatctcaccatactttattactgatcccaaatcttctaaagttgaatttgaaaaaccattgttgttattgtctgagaagaagatttcttccattcaggatattttgccggctttggaaatttccaaccaatctagaagaccattgctgattatcgccgaagatgtagacggtgaagctttagccgcctgtattttaaacaagttgagaggtcaagttaaggtctgcgctgtcaaagctccaggcttcggtgataacagaaaaaatactataggcgacatcgctgttttgaccggtggcaccgtcttcactgaagaactagatctaaagccagaacaatgtacaatcgaaaatttgggttcctgtgattccattactgttacaaaggaagatactgttatccttaacggttccggtccaaaagaagccattcaagaaagaattgaacaaatcaaaggttccatcgacatcacgacaaccaattcttacgaaaaggaaaagttgcaagagagactggctaagttatctggcggagtcgccgttatcagagtcggtggagcctctgaagtcgaagtgggtgaaaagaaagaccgttatgacgacgctttaaatgctaccagagcggccgttgaagaaggtattctcccagggggaggtactgcattggttaaggccagtagagtcttggacgaagttgtggttgacaacttcgatcaaaagctgggtgttgacatcatcagaaaggctatcaccagaccagccaagcaaattatcgaaaacgcaggtgaagaaggtagtgttattattggtaagttgatcgatgagtacggtgacgattttgctaagggttacgacgcctccaagtcggagtataccgatatgttagctactggtattatcgatccattcaaagttgttagaagcggtctagttgatgcttcgggtgttgcttctttgctagcaaccaccgaagtggctattgttgacgcccctgaaccaccagctgctgctggtgctggtggtatgccaggtggtatgcctggtatgcctggtatgatgtaa

SEQ ID NO: 4759 - DNA, 204 bp, Artificial Sequence
  Optimized genes for Saccharomyces cerevisiae
atggattctaagacaccagtcactttggccaaggttattaaggttttgggtcgtactggttctagaggtggtgttacccaagtgagagtcgaattcctagaagatacttccaggaccatcgttagaaacgtaaaaggtccagtccgtgaaaatgacattttagttttgatggaatctgaaagagaggctagaagattgagataa

SEQ ID NO: 4760 - DNA, 1689 bp, Artificial Sequence
  Optimized genes for Saccharomyces cerevisiae
atgagtttgctatatattatcttgctatttacccaatttttgttgttacctactgacgcttttgatcgttccgctaacacaaatatcgctgtctactggggtcaaaactctgccggtactcaagaatctttagccacgtactgtgaatcttccgacgccgatatcttcttgttatcctttttgaatcaatttcctaccctgggccttaatttcgccaacgcctgttccgatactttctctgacgggttgttgcactgtacccaaatcgctgaagacattgaaacttgtcaatctttgggcaaaaaggttttgttgtctctaggtggcgctagtggttcttacttattcagtgacgattcccaagctgaaaccttcgctcaaacattgtgggacactttcggtgagggtacaggtgcttctgaaagaccattcgacagcgcagtggtcgatggtttcgacttcgacattgaaaacaacaatgaagttggttactctgctttggccacaaagttgagaactttgtttgctgaaggtaccaaacaatactacttgtccgctgcccctcaatgtccatacccagatgcatcagtcggtgatttgctagaaaatgctgacatcgatttcgcttttattcagttctacaacaactactgttctgtctccggtcaattcaactgggatacttggttgacttacgcccaaactgtctcgcccaacaaaaatatcaagctcttcttgggtctaccaggttctgcatctgccgctggttctggttacatttctgatacctccttgttggaatccaccattgccgatattgcaagttcttcatccttcggaggtattgcattatgggacgcttcccaagctttttctaacgaactgaatggtgagccatatgttgaaatccttaagaacttgttgacctctgcatcccagaccgctaccactacggtcgctacttcgaagacctctgctgcttccacaagctctgcctccacttcctctgcctccacttcccaaaagaagactactcaatccactactagtacacaatccaaatctaaggtgactttgtccccaaccgcttcttctgcgatcaagacttcaattactcaaactactaaaactttaacctcttcgaccaagacaaagagctccttaggtaccaccactaccgaatcaacccttaactcagttgctattacatctatgaagactaccttatcttcccaaatcacttccgctgctttagttactccacaaactactactaccagtatcgtttcttctgctccaattcaaacggctataacctctaccttatctccagccacgaagtcttctagcgtagttagtttgcaaactgcgaccacctccaccttgtcaccaacaactacctctactagctccggttctacttcgtctggttccacctcatccgatagcactgctagaactttggctaaggaattgaacgctcagtatgccgccggtaaattgaacggtaagtctacatgcactgaaggagaaattgcttgttcagctgacggtaagttcgctgtttgtgatcattctgcctgggtttatatggaatgtgcttctggtaccacttgctacgcttatgattcaggtgactctgtctatacccaatgcaacttctcttacctggagtctaactacttttaa

SEQ ID NO: 4761 - DNA, 192 bp, Artificial Sequence
  Optimized genes for Saccharomyces cerevisiae
atggctaaggttcacggttctttggctagagccggtaaggttaagtcccaaaccccaaaggtcgaaaagactgaaaagccaaaaaagcctaaaggtcgtgcttataaaagattgttatacacaagaagattcgttaacgtgactttggtcaatggtaagagaagaatgaacccaggtccatctgttcaataa

SEQ ID NO: 4762 - DNA, 1335 bp, Artificial Sequence
  Optimized genes for Saccharomyces cerevisiae
atgccaagccactttgacacagttcaattgcacgctggacaagaaaatccgggtgataacgctcaccgttctagagcagtccctatttatgctacaacttcttacgttttcgaaaactccaagcatggttcccaattatttggtttagaagttccaggttacgtttatagtaggttccagaaccccacctctaacgtattagaagaacgtatcgctgctttggagggtggtgcggctgctcttgctgtctcctctggtcaagccgctcaaaccttggccatccagggtttggctcacaccggtgataacattgtttcaacttcttatctgtacggtggtacttacaaccaatttaagatcagtttcaaaagattcggcatcgaagctagattcgtcgaaggtgacaacccagaggaatttgaaaaagtgttcgacgaaagaactaaggccgtctatttggaaactattggtaatccaaagtacaacgttccagactttgaaaagattgttgccattgcacataagcacggtatccctgtcgtcgttgataacacttttggtgccggtggttatttctgtcaaccaataaagtacggtgctgacatcgtcacccattcagcaaccaaatggatcggtggtcacggtactaccattggcggcattatcgttgattccggtaagttcccatggaaagattacccagaaaagttcccacaattctctcaaccagccgaaggttaccacggtacaatttataacgaggcttacggaaacttggcttacatcgttcatgtgagaactgaactcttaagagatctaggtcctttgatgaatccattcgcttcttttttgttgttacaaggtgtcgaaactttgtctttgagagctgaaagacacggtgaaaatgccctaaaattggccaagtggttggaacaatccccatacgtctcctgggtttcttaccctggtttggcttcccatagccatcacgaaaatgccaagaagtacctttcgaatggttttggtggcgttctatctttcggtgttaaggacttgccaaacgccgataaggaaaccgacccattcaaactgtctggggcacaagtcgttgataacttgaagttggcttctaatttggctaacgttggtgacgctaagactttggtgattgccccttacttcactacccataagcaattaaacgataaggaaaagttggcttcaggtgttacgaaagacttaattagagtttctgtagggattgaatttatcgacgatattattgctgatttccaacaatccttcgagaccgtcttcgctggtcaaaaaccataa

SEQ ID NO: 4763 - DNA, 2337 bp, Artificial Sequence
  Optimized genes for Saccharomyces cerevisiae
atgctaagtgctagatcggctattaagagaccaattgtccgtggtttagctaccgtttctaacttgactagagacagtaaggttaaccagaacttgttggaagatcactcttttattaattacaaacaaaatgtcgaaactttggacatcgttagaaaaagacttaacagaccatttacttacgccgagaagatcttatacggtcacttagatgatccacatggtcaagatatccaaagaggtgtttcatatttgaagctacgccctgatagagttgcttgtcaagacgcaaccgctcagatggccatcttgcaattcatgagcgctggtttgcctcaagttgcgaagccagttactgtccattgtgaccatttgatccaagcacaagttggtggtgaaaaagacctgaagcgtgctatcgacttgaacaaggaagtgtatgatttcttggcttccgctacagctaaatataatatgggtttttggaagcccggttctggcattatacatcaaattgttttggaaaactacgctttcccaggggctttgataattggtactgactcacacaccccaaatgccggtggcttgggtcaactggctatcggtgtcggtggtgcagatgctgtcgacgtcatggccggtagaccatgggaattgaaagctcccaagatcttgggtgttaaattaaccggaaagatgaacgggtggacttctccaaaggacatcatcttaaagttggccggtatcactaccgtgaagggtggcactggtaagatagtcgaatacttcggtgacggtgtcgatactttttccgctaccggtatgggcaccatttgcaacatgggtgctgaaatcggagctacaacctccgttttcccatttaacaagtctatgattgaatatttggaagctaccggcagaggtaaaattgccgactttgctaagctgtaccataaggacttgttatctgctgacaaggatgctgagtacgatgaagtagtagaaattgacttaaacactttggaaccatatattaacggtccatttactccagacttggctacccctgtctccaaaatgaaggaagttgctgtcgccaacaactggcctttggacgttagagttggtttaatcggttcttgtactaattcttcatacgaagacatgtctagatctgcttcaatcgtcaaggatgcagctgctcacggtcttaagtccaagaccattttcactgtgacgcctgggtccgaacaaattcgtgctactattgaaagagatggtcaattagagactttcaaggaattcggtggtattgtgctagccaacgcttgtggtccatgtatcggccaatgggataggagagatattaagaagggtgataagaacaccattgtcagctcctataaccgtaatttcacctcgagaaacgatggtaacccacaaactcacgccttcgttgcctccccagaattggttacagctttcgctattgctggtgacttaagattcaacccactaaccgataagttgaaagataaggacggtaatgaatttatgttgaagccaccgcatggtgatggtttgcctcaaagaggttacgatgctggtgagaatacttaccaagccccaccagctgacagatccacagtcgaagttaaggtttccccaactagtgacagattgcagttgttgaagccatttaagccatgggacggtaaagatgccaaggatatgccaatcctaatcaaggccgtcggtaagactacaactgatcatatttctatggccggtccatggttgaaatacagaggtcaccttgaaaacatttctaataattacatgatcggtgctatcaacgctgaaaacaaaaaagccaactgcgttaaaaatgtctatacaggtgaatacaagggtgttccagacactgccagagactacagagaccaaggtattaagtgggtcgttattggtgatgagaatttcggtgagggttcttctagggaacacgcggctttggaacctagattcttgggtggtttcgcaattatcaccaagtctttcgcccgtatccacgaaaccaacctcaaaaagcaaggcttattaccattgaacttcaagaaccctgccgattacgataaaatcaatcctgacgaccgtattgacattttgggattggcagaactagctccaggtaagccagttactatgagagttcacccaaagaacggtaagccatgggatgctgtattgacccacacgttcaacgatgaacaaattgaatggtttaaatacggatctgctcttaacaagatcaaggcagatgaaaaaaagtaa

SEQ ID NO: 4764 - DNA, 237 bp, Artificial Sequence
  Optimized genes for Saccharomyces cerevisiae
atggccagagaaattaccgatatcaagcaattcttggaactgactagaagagcagacgtcaagaccgccaccgttaagatcaacaaaaagttaaataaagctggtaagccatttcgtcaaactaagttcaaagttagaggttcttcttccctttacacattggtcattaacgatgctggtaaagctaagaagttaattcaatctttgcctccaactttgaaggttaacagactataa

SEQ ID NO: 4765 - DNA, 939 bp, Artificial Sequence
  Optimized genes for Saccharomyces cerevisiae
atgggtgggatcagagaaaagaaggctgaatacttcgctaagttgcgtgagtatttagaagaatacaagtccttgtttgtggtcggtgtcgataatgtatccagccaacaaatgcatgaagtcagaaaggaattgagaggtagagctgtagttctaatgggtaaaaacactatggtgagaagagctattagaggtttcttgagtgacttacctgatttcgaaaaattgttgccatttgttaagggaaacgttggtttcgtttttaccaatgaaccattgactgaaattaaaaacgttattgtctccaatagagtcgctgccccagcgcgtgctggtgcagttgcaccagaagacatttgggttagagctgttaacaccggtatggagccaggcaagacatctttctttcaagccttaggtgtcccaactaagatcgccaggggcacaatcgaaatcgtttctgacgttaaggtggtcgacgctggtaacaaggtcggtcaatctgaagcttctctgttgaatttattgaacatttctccttttactttcggtttgaccgttgtccaggtctacgataacggtcaagttttcccaagttctattctagacattaccgatgaggaattggtttctcacttcgtttctgccgtttccacgatcgcttcaatatcgttagccattggttaccctactttgccatctgttggtcatactctaattaacaactacaaggacttgttggcagttgctatcgctgcttcataccactatcccgaaatcgaagatcttgtcgacagaatcgaaaacccagaaaaatatgctgctgctgccccagccgctacctccgctgcttccggtgatgctgccccagcagaagaagccgctgccgaagaagaggaagaatctgatgatgatatgggtttcggtcttttcgactaa

SEQ ID NO: 4766 - DNA, 5631 bp, Artificial Sequence
  Optimized genes for Saccharomyces cerevisiae
atgaacacagaccaacaaccataccagggtcaaactgattatactcagggtccaggtaatggtcaatcccaagaacaagactacgaccaatacggtcaaccattgtacccatcccaagccgacggttactacgatccaaacgttgcagctggtactgaggccgacatgtacggccaacagccaccaaacgaatcttacgaccaagattataccaatggtgaatactacggtcaaccaccaaacatggccgctcaagacggcgaaaacttttccgacttctcttcatacgggccaccaggtactccaggttacgactcttatggtggtcaatacactgcttctcagatgtcctacggtgaaccaaactcatcgggtacttctactcctatttatggtaactatgacccaaacgctattgccatggctctcccaaacgaaccttacccagcctggactgctgattctcaatctccagtctctattgaacaaatcgaagacatttttatcgatttaaccaatagattaggtttccaaagagattctatgagaaacatgttcgaccatttcatggtcttgttggattctcgttcctccagaatgtctccagaccaagctttattgtcgttacacgcagattacattgggggtgatactgctaattataagaagtggtacttcgccgcacaattggacatggatgatgagatcggtttcagaaacatgtctttgggtaagttatcaagaaaggctagaaaagctaaaaagaaaaacaagaaggctatggaagaagctaacccagaagatactgaagaaactctaaacaagatcgaaggcgataactcccttgaagctgcggacttcaggtggaaggccaagatgaaccaattgtcgccattggaacgtgtgagacacattgctttgtacctattgtgttggggcgaagctaaccaggtgagattcactgccgaatgtctttgtttcatctacaagtgtgctttggactacctagattctcctttatgccagcaaagacaagaaccaatgccagaaggtgattttttgaacagagtcattacccctatctaccacttcattagaaaccaagtttacgaaatcgtcgatggcagattcgttaaaagagaaagggatcacaacaaaatagtcggatatgacgatttgaaccaactcttttggtacccagagggtattgccaagattgttttggaagacggtacaaaattaattgaattgcctttagaagaaaggtacttgaggctaggcgacgttgtctgggatgacgtcttcttcaagacttataaggaaactagaacttggctgcacctcgtcaccaacttcaatagaatttgggttatgcacatctctattttttggatgtatttcgcgtataactctccaacgttctacacccacaactaccaacaattggtagataaccaaccattggctgcctacaagtgggcttcctgcgctttaggtggtactgtggcttctctgattcaaattgtcgctactttgtgtgagtggtctttcgttccaaggaaatgggctggtgcacaacatctttccagacgtttctggttcttgtgtattattttcggtatcaatttgggaccaattattttcgttttcgcctatgataaggacactgtttattcaactgctgctcacgtcgtcgccgcagtgatgttttttgttgctgtggctacgatcatttttttttcaatcatgcctttgggtggtttgttcacctcttacatgaaaaagagtaccagaagatacgttgcttcccaaacatttaccgctgcattcgccccacttcatggcctggatcgttggatgtcttatctggtctgggttactgtcttcgctgctaagtactctgaatcctactattttttggtcttatccctaagagatcctatcagaattttatctaccaccgccatgagatgtactggggaatattggtggggtgccgtcttgtgtaaagttcaacccaagatcgttttgggcttggttatcgcgactgatttcatcctattcttcttggacacatacctatggtatatcatcgttaatacgatcttttccgtcggtaagtctttttacttgggtatctctatcttgacaccttggagaaacatatttactcgtttgccaaagcgtatctattccaagatcctagccactaccgatatggaaatcaaatataagcccaaagttttgatatctcaggtctggaatgctattatcatctctatgtatcgtgaacacctgcttgctattgaccacgtgcaaaaactgctttaccatcaagtcccatctgaaatcgaaggtaagagaaccttgagagcaccaaccttcttcgtctcccaagatgataacaatttcgaaaccgaatttttccctagagactccgaagctgaaagaagaatttctttcttcgctcaatcattgagcactccaattcccgaaccattacctgtagataacatgccaacttttaccgtcttgactccacactacgcagaacgtattttattgtccttgagagaaattattcgcgaagacgaccaattcagtagagttactcttttagagtacctgaagcaattacatccagtagaatgggaatgttttgttaaggatactaagatcctagccgaagagacagctgcttacgaaggtaatgaaaacgaagctgaaaaggaagatgccttaaaaagccaaatcgatgacttgcctttctattgtattggtttcaaaagtgccgctccggagtacaccttgagaactcgtatctgggcctctttgagatcccaaactttgtacagaactatcagcggtttcatgaactatagtagagccatcaagttattgtacagagttgagaaccctgaaattgtccaaatgttcggtggcaacgctgagggtctggaaagagaattagaaaagatggcccggcgtaagttcaagttcttagtttctatgcaaagattggctaagttcaagccacacgaacttgaaaatgctgaattcttgttgagagcctatccagacttgcaaattgcttatttggatgaagaaccaccattgacagaaggtgaagaaccaagaatttattcggctttgattgacggtcattgtgaaatcttagacaacggtagaagaaggccaaagtttagagttcaattgtccggtaatcccatattaggtgacggtaaatccgataatcaaaatcacgctttgatattctacagaggtgaatacatccaattaattgatgccaatcaagataactacttagaagaatgcttgaagatcagaagtgttctagctgaattcgaagagctaaacgtcgaacaagttaatccatacgccccaggtttgcgttacgaggaacaaaccactaaccatcctgtcgccattgttggtgctcgtgaatacattttttctgagaactctggtgttttgggtgacgtagcggctggtaaagagcaaacattcggtaccctgttcgcaagaaccttgtctcaaatcggtggtaaattgcactacggccaccctgattttatcaacgctacttttatgaccaccagaggtggtgtttccaaggcccaaaagggtttgcatttgaatgaagacatctatgcaggtatgaacgccatgttaagaggtggtagaatcaagcattgtgaatattaccaatgtggtaagggtagagacttgggatttggtaccatcttgaattttacaactaagattggtgccggaatgggtgagcagatgctgtcacgcgaatactactacttgggaactcaattgccagttgacagattcttgaccttctactacgctcacccaggtttccatctaaataatcttttcattcaattgtccttacaaatgtttatgttgacattggtcaacctaagctccttggcccatgaaagcatcatgtgcatttacgatcgtaacaaaccaaagaccgacgttttggttccaattggttgttacaatttccaaccagctgttgattgggttagaagatacacactttctatcttcattgtcttctggattgcatttgttccaatcgttgtccaagagttgattgaaagaggtttgtggaaagctacccaaagattcttctgtcacctattgtccttatctccaatgtttgaagtatttgctggtcaaatttactcttctgccttgttatctgacttggcaattggtggtgctaggtacatatccactggtagaggtttcgctaccagtagaatcccattttcaatattgtactccagatttgcaggatctgctatttacatgggtgctagatctatgctaatgttgctatttggtactgtagctcattggcaagcccccttgttgtggttctgggctagcttgtcatccttgattttcgctccatttgttttcaacccacatcaattcgcttgggaagacttcttcttggattacagagattatattagatggttgagtagaggtaataaccaataccatagaaacagctggatcggttacgttcgtatgtctagagctcgaatcactggttttaagagaaagctagtgggtgacgaatctgaaaaggctgctggggatgcttctagagcccatcgtactaacttgattatggctgaaattattccatgcgctatctatgctgctggttgtttcattgctttcactttcatcaacgcccaaaccggtgttaaaactaccgatgacgaccgtgttaactccgttttaagaattatcatttgtactttagccccaatcgctgttaatttgggcgtcctcttcttttgtatgggtatgagttgttgttccggtccgttgtttggtatgtgttgtaagaagaccggttcagttatggccggtattgcccatggtgttgctgttattgtccatatcgcttttttcatcgtcatgtgggtgttagaatcttttaactttgttcgtatgttaatcggtgtcgtcacctgtattcaatgccaaagattaattttccactgtatgactgctttaatgttgaccagagaattcaaaaacgaccacgctaacactgcgttttggacgggtaagtggtatggtaagggcatgggttacatggcttggacacaaccatctagagagttgaccgcaaaggtcatcgaattgtccgaattcgccgctgactttgttttgggtcacgttattcttatctgtcagttgcctttgatcatcattccaaaaattgataagttccactctattatgttgttttggttgaagccttctagacagattcgtccaccaatttacagtttgaagcaaacaagattgagaaagcgtatggttaaaaagtactgttccttgtacttcttggtgttagctattttcgctggttgcattattggtccagctgtcgcttcggctaagattcataagcacattggtgactccttagatggagtcgttcacaacctattccagcctatcaacaccactaacaacgataccggttctcaaatgtctacctaccaatcacactactatacccacaccccttctttgaagacttggtctactatcaagtaa

SEQ ID NO: 4767 - DNA, 384 bp, Artificial Sequence
  Optimized genes for Saccharomyces cerevisiae
atggctaagcaatccttggacgtctcctctgacagaagaaaggctaggaaagcttatttcaccgctccatcatctcaaagaagagtcttgttgagcgccccactgtctaaagaactaagagcccagtacggtattaaggctttgccaattcgtagagatgatgaagttttggtagtcagaggctctaaaaaaggtcaagaaggtaagatttcctcggtgtaccgtttgaaatttgctgttcaagttgataaggttactaaggagaaggttaatggtgcatctgtcccaatcaaccttcatcctagtaagttagttatcactaagttacacttggataaggacagaaaggccttgatccaaagaaagggtggtaagttagaataa

SEQ ID NO: 4768 - DNA, 1188 bp, Artificial Sequence
  Optimized genes for Saccharomyces cerevisiae
atgttgcgtacccaagccgctagattgatttgtaacagtagggttattacggctaaaagaacatttgcacttgccaccagagctgctgcttactccagacctgctgctagatttgttaagcctatgatcactacaagaggtttgaagcaaataaacttcggtggtactgtagagaccgtttatgaaagagctgactggccacgtgaaaagttgttggactacttcaagaatgatactttcgcattgattggttacggttcccaaggttacggtcaaggtctgaatttgagagataacggtttaaacgtcattattggtgtaagaaaagatggagcctcctggaaggctgcaattgaggatggttgggttccaggtaaaaacctgttcaccgtcgaagatgctattaagagaggttcttacgttatgaacctcttgtctgacgctgcccagtccgaaacctggccagctatcaagccactattgaccaagggaaagaccttgtatttctcacacggtttctctccagtttttaaagacttaactcatgttgaaccaccaaaagacttggatgttatcttggttgcgccaaagggctcgggtagaactgtcagatccttatttaaggaaggcagaggtattaattctagctacgctgtctggaacgacgtcactggtaaggcccatgagaaggctcaagctttagctgtggctattggttctggttacgtttaccaaactactttcgaaagagaagtcaactccgatctatacggtgaaagaggctgcttgatgggtggtatccacggtatgttcttggcccaatacgatgttcttagagaaaacggtcactctccatcagaagcttttaacgaaaccgtcgaagaagccactcaatctttatacccattgatcggtaagtatggtatggactatatgtacgatgcttgtagtacaactgcccgtcgtggtgccttggactggtatcctatcttcaaaaacgcattaaagccagtcttccaagatctatacgaatctactaagaatggtaccgaaactaagcgttctttggaatttaactctcagcccgactatagagaaaagttggaaaaagaattggacactatcagaaatatggaaatctggaaagttgggaaggaagtgagaaagttaaggccagagaaccaataa

SEQ ID NO: 4769 - DNA, 171 bp, Artificial Sequence
  Optimized genes for Saccharomyces cerevisiae
atggctcatgaaaatgtttggttctctcacccaagacgttatggtaagggttctagacaatgtcgtgtctgttcctctcacactggtttgatcaggaagtacggtttgaacatttgtagacaatgctttagagaaaaagccaacgatattggtttcaacaagttcagataa

SEQ ID NO: 4770 - DNA, 237 bp, Artificial Sequence
  Optimized genes for Saccharomyces cerevisiae
atgttatgtcaacaaatgattagaactaccgccaagcgttcctctaatattatgacaagaccaattatcatgaaaagatctgttcacttcaaggatggtgtctacgaaaacatcccttttaaggttaagggtagaaagactccatacgctttgtctcatttcggttttttcgctatcggttttgccgtcccattcgtggcttgttatgttcaattgaagaaatctggtgctttctaa

SEQ ID NO: 4771 - DNA, 342 bp, Artificial Sequence
  Optimized genes for Saccharomyces cerevisiae
atggccggtttgaaggacgtcgttactagagagtacactattaacttgcacaaaagattgcacggtgtctctttcaagaagagggcccctagagctgttaaggaaattaagaagttcgctaagttgcatatgggtacagaggacgtccgtctagcaccagaattaaatcaagctatctggaaaagaggcgttaagggtgttgaatacagactgagattaagaatctccagaaaacgtaacgaagaagaagatgctaaaaacccattgttttcttatgttgaaccagttttggttgcttctgctaagggtcttcaaaccgtcgtagtggaagaagatgcctaa

SEQ ID NO: 4772 - DNA, 768 bp, Artificial Sequence
  Optimized genes for Saccharomyces cerevisiae
atggccgtcgggaaaaacaagagactatcaaagggtaagaaaggtcaaaaaaagagagtagttgatccattcaccagaaaggaatggtttgacatcaaagctccatcgacttttgaaaatcgtaacgttggtaagacattggtcaacaagtctactggtctgaagtccgcctctgacgcattgaagggtagagttgtagaagtttgtttagctgatttgcagggatccgaagaccattccttccgtaagatcaagttgagagtggacgaagtccaaggtaagaacttattaaccaactttcacggcatggatttcactaccgataagttgagaagtatggttagaaaatggcaaaccttgattgaggccaatgttactgtgaagacttccgatgactacgtcttgagaatattcgctattgcgttcactcgtaagcaagctaatcaagtcaagaggcactcatatgctcaatcttctcatatcagagcaattagaaaggtcatctctgaaatcttgaccaaagaagttcaaggtagcactctcgctcagttgacatctaagttaattcctgaagttattaacaaggaaattgagaacgctacgaaagatatcttcccattgcaaaacattcatgttagaaaggttaaattgttgaagcaaccaaagttcgatgtcggcgctttgatggcccttcacggtgaaggttctggtgaagaaaagggtaaaaaggtcaccggttttaaagacgaggttctagaaactgtttaa

SEQ ID NO: 4773 - DNA, 531 bp, Artificial Sequence
  Optimized genes for Saccharomyces cerevisiae
atgaccgctcaacaagctccaaagtggtatccatctgaagacgtggctgcccctaagaagaccagaaaagctgtcagacctcaaaagcttcgtgctagtttagttccaggtacagttttgattttgctggctggtagattcaggggcaaaagagtcgtctacctaaagcacttagaggataacactttgctagttaccggtccattcaaggtcaacggtgttcccttaagaagagtgaacgctagatacgtcatcgcaacttcaactaaagtttctgttgaaggtgttaatgtcgaaaagtttaacgtagaatacttcgccaaagaaaagttgactaaaaaggaaaaaaaggaagccaatttattcccagaacaacagactaaggaaattaaaactgaacgtgtcgaagatcaaaaggttgttgacaaggccttgttggctgagatcaagaagaccccattgttgaagcaatatttgtccgcttccttctctttgaagaacggtgataagccacatttgttgaagttttaa

SEQ ID NO: 4774 - DNA, 1152 bp, Artificial Sequence
  Optimized genes for Saccharomyces cerevisiae
atgtctgagaccgaattgagaaagagacaagctcaattcaccagagaactccacggtgacgatattggtaagaagactggtttaagcgctctgatgtccaagaacaactccgcccaaaaggaggccgttcagaaatacttgagaaactgggatgggaggactgataaagatgccgaagaacgtagattggaagactacaacgaagcaacccactcctactacaacgttgttacagacttttatgaatacggttggggttcttccttccacttcagtagattctacaaaggtgaatcttttgccgcctctattgctagacacgaacattacttggcttataaggctggtatccaaagaggcgatttggtcttggacgtcggatgtggtgttggtggtccagctagagaaattgcaagatttaccggttgcaacgtcatcggtttgaataacaacgactaccaaattgctaaagctaagtattatgctaaaaagtacaacttatctgatcaaatggactttgtaaaaggtgatttcatgaagatggattttgaggaaaatacttttgataaagtctacgctattgaagctacgtgtcatgctcctaagttggaaggtgtttactctgaaatctacaaggttctaaagcccggtggtaccttcgccgtttatgagtgggttatgacagacaagtacgatgaaaataacccagaacatcgtaagatagcttacgaaattgaattgggtgacggcatcccaaagatgtttcacgttgatgttgcccgtaaggcacttaaaaactgtggtttcgaagtattagtgtccgaagaccttgctgataacgacgacgaaatcccatggtactatcctttaaccggtgaatggaagtatgtccaaaacttggcgaatttggccactttcttcagaacttcatacttaggtagacaattcacaactgctatggttaccgtcatggaaaagttgggtttggccccagaaggatcaaaggaagtcactgctgctttggaaaatgctgctgttggtctagtggccggcggtaaatctaagctattcaccccaatgatgctgttcgtcgcaagaaagccagaaaatgctgaaactccatctcaaacttcgcaagaggctactcagtaa

SEQ ID NO: 4775 - DNA, 636 bp, Artificial Sequence
  Optimized genes for Saccharomyces cerevisiae
atgcaagtcttgcaattgtggttgaccactctaatttcgttggtcgtcgccgttcaaggtttacatttcgacatagctgctagcactgacccagaacaggtttgtatcagagatttcgttactgaaggtcaattggtggttgctgatattcactccgatggatccgtcggtgacggtcaaaagttaaatttatttgttagagattcagtgggcaacgaatatagaagaaaaagagattttgccggtgatgttagagttgcttttaccgcccctagttctactgctttcgacgtatgtttcgaaaatcaagcacaatatcgtggtagatctctttccagagccattgaactagacattgaatccggtgctgaggctagagattggaacaaaatttctgctaacgaaaagctgaagccaatcgaagtcgagttgaggcgtgttgaggaaatcactgacgaaattgtcgatgaattgacctacttgaagaatagagaagaacgtttaagagacaccaacgaatctacaaacagaagagtcagaaacttctctatcttggttatcattgttttgtcttctttgggtgtttggcaagtcaactacttgaagaactacttcaagactaaacacattatctaa

SEQ ID NO: 4776 - DNA, 411 bp, Artificial Sequence
  Optimized genes for Saccharomyces cerevisiae
atgggtagagtacgtaccaaaactgttaagagagcctccaaagccttgatcgaaagatattatcctaagttgactcttgatttccaaacaaacaagagactatgtgatgaaattgctaccatccagtctaagcgtttaagaaacaagatcgcaggttacaccactcacctgatgaagagaattcaaaagggtccagttagaggtatttcctttaagttgcaagaagaggaaagagaaaggaaggatcaatacgttccagaagtctccgctttggacttgtctcgttctaacggtgtcttaaatgtggacaaccaaacttcagatttggttaaaagcttaggcttgaaactaccattgtctgtcattaatgttagtgctcaaagagacagaagatacagaaagagagtctaa

SEQ ID NO: 4777 - DNA, 441 bp, Artificial Sequence
  Optimized genes for Saccharomyces cerevisiae
atgtctttagttgttcaagaacaaggatcctttcaacacattctaagactattgaatactaacgtcgatggtaatatcaagattgtctatgctttgactaccattaagggtgttggtagaagatactctaacttggtctgtaagaaagctgatgtggacttacataaacgtgccggtgaattgacccaggaagaactggaacgtatcgtacaaattatgcaaaacccaacacactacaagattccagcatggttcttaaacagacaaaacgatatcactgacggtaaggactaccatactttggctaacaatgttgaatctaagcttcgtgacgatttggagagattgaagaaaatcagagcccatagaggtattagacacttctggggcttgagagttagaggtcaacacaccaagaccactggtagaagaagggcttaa

SEQ ID NO: 4778 - DNA, 591 bp, Artificial Sequence
  Optimized genes for Saccharomyces cerevisiae
atggtggcccaagtgcaaaaacaggctcctacctttaaaaagactgctgtcgttgacggtgtcttcgatgaagtctccctagataagtataagggcaagtacgttgtcttggctttcatcccattggctttcactttcgtttgtccaaccgaaattatcgccttttctgaagctgctaagaaatttgaagaacaaggagctcaagttttatttgccagtaccgactctgaatatagcttgctggcttggacaaatataccaagaaaggaaggtggtttaggtcctattaacattcccttgttggcagatacgaatcattctttgtccagagactacggtgttcttatcgaagaagaaggtgttgccttgagaggtttgttcatcattgatccaaaaggtgttatcagacacattactattaacgatctaccagttggtcgtaacgttgacgaagcattgagattggtagaagctttccaatggaccgacaagaacggtacagtcttaccatgtaactggactccaggtgctgctaccattaagccaactgtcgaggattcaaaggaatacttcgaggcggccaacaagtaa

SEQ ID NO: 4779 - DNA, 768 bp, Artificial Sequence
  Optimized genes for Saccharomyces cerevisiae
atggccgttggtaaaaacaaacgtctatcaagaggtaaaaagggtttgaaaaaaaaggttgttgatccatttaccagaaaggagtggtttgatatcaaagctccatctaccttcgaaaacagaaatgtcgggaagacgttagtaaacaagtctactggtctaaaaaatgcttccgacgcattgaagggccgtgttgttgaagtctgtttggctgatttacaaggttccgaagatcactcgttcagaaaggtcaaattaagagtcgacgaagtccaaggtaagaatttgctcaccaacttccatggtatggatttcactactgacaagttgcgtagcatggtcagaaagtggcaaactttgattgaagctaacgtaactgttaagacctctgacgactatgtgttgagaatcttcgccattgcgtttactagaaagcaagctaatcaagttaagagacattcttacgcacaatcttctcatataagggccatcagaaaagttatttccgaaatccttacaagagaagtccaaaactccactttagctcaattaactagtaaattgattccagaagtgattaacaaggaaatcgagaacgctaccaaggatatcttccctttgcagaacattcacgttagaaaggttaagttgttgaagcaaccaaagtttgatgtcggtgccttgatggctttgcacggagagggttcaggtgaagaaaagggtaagaaggtttctggtttcaaggacgaagttctggaaaccgtctaa

SEQ ID NO: 4780 - DNA, 531 bp, Artificial Sequence
  Optimized genes for Saccharomyces cerevisiae
atgtccgctcaaaaggcccctaaatggtacccaagcgaagacgttgccgctcttaagaaaactagaaaagctgctagaccacagaagttgcgtgcctctttagtacctggtacagtcttgatcctgttggcaggtaggttcagaggtaagcgtgtcgtgtacttaaagcatttggaagataacactttgttgatcagtggcccattcaaggttaacggtgtgccattgagaagagtcaacgccagatatgtcattgctacctccactaaggtttctgttgaaggtgttaatgttgaaaagtttaatgtcgaatacttcgctaaggaaaaattgaccaaaaaagaaaagaaggaagcgaacttattccccgagcaacaaaacaaggaaattaaggcagagagagtcgaagaccaaaaggttgttgataaggctctaattgctgaaatcaaaaaaaccccattgttgaagcaatatttgtcagcttctttctccttaaagaacggtgataagccacacatgctaaagttttaa

SEQ ID NO: 4781 - DNA, 180 bp, Artificial Sequence
  Optimized genes for Saccharomyces cerevisiae
atgttgaagcgtttccctactccaatcttgaaagtttactggccattttttgttgctggtgcagctgtctattacggtatgtctaaggctgccgatttatcctctaacaccaaagaattcattaacgacccaagaaatccaagattcgctaagggtggtaagttcgtcgaagttgattaa

SEQ ID NO: 4782 - DNA, 960 bp, Artificial Sequence
  Optimized genes for Saccharomyces cerevisiae
atggcttccaacgaagttttagtgttgcgtggtactttagaaggtcacaacggttgggttacttcgttggctacctctgccggtcaacctaacctattgttgtctgcctctagagacaagaccttgatatcttggaaattgacaggtgacgaccaaaagtttggtgttccagtcagaagctttaaagggcactctcacattgttcaagattgtactttaacagcagatggcgcatacgccttgtctgcatcttgggacaagacccttagattgtgggatgttgccactggtgaaacttaccaaagattcgtaggtcataagtccgacgtaatgtcagttgacatcgataagaaggcttccatgattatctctggtagtagagacaagaccatcaaagtttggactattaagggtcaatgtttagctacactattaggtcacaatgattgggttagtcaagtcagagtcgttccaaatgaaaaggctgacgatgattcagtgaccattatttccgctggaaacgataagatggttaaggcttggaacttgaatcaattccagattgaggccgatttcatcggtcataactcaaacatcaacactctcactgcttctccagatggtaccctgatcgcttccgctggtaaagacggcgaaattatgttgtggaacctggctgccaagaaagccatgtacactctatccgctcaggacgaagtcttttctttggctttctccccaaacaggtactggttggctgcagctaccgctacgggtatcaaggtcttctccttggacccacaatatttggtcgatgacttgagacctgaattcgctggttattctaaggccgctgaaccacatgctgttagccttgcctggtctgcggatggtcaaactttgtttgctggttacaccgataatgtcattcgtgtttggcaagtcatgactgccaattaa

SEQ ID NO: 4783 - DNA, 255 bp, Artificial Sequence
  Optimized genes for Saccharomyces cerevisiae
atggcatcctctacctctaccagtgcttccgcttcctcttccattaagactaactcagctttggtcagtaataatgttgtagccgcttctagcgtgtctgctacatctactgcctcgtcttctgcagctaagaacactacctcctcttctaagaacgctgccccaggtatggttgcgaacccagtctcatctaaatacggtatcattatggctgctttcgccgccgtttcctttgttttgggtactggtatctaa

SEQ ID NO: 4784 - DNA, 600 bp, Artificial Sequence
  Optimized genes for Saccharomyces cerevisiae
atggccatttccaaaaacttgcccattttgaagaaccacttccgtaagcactggcaagagagagtcaaggtccatttcgatcaagccggtaagaaggtttctagaagaaacgctagagctgctagagccgctaagattgctccaagaccattagacttgttaagaccagtcgttagagctcctaccgttaagtataataggaaggtcagagcaggtcgtggctttactttggctgaagtgaaggcagccggtttgaccgctgcttacgctagaaccattggtattgctgttgatcatagaagacagaacagaaaccaagaaatctttgatgctaatgtccaaaggctgaaggaataccaatcaaagatcattgttttccctagagacggtaaagccccagaagccgaacaagttttgtctgctgctgccacatttccaatcgcccaaccagcgactgacgtagaagctagagccgttcaagataacggtgaatctgcattccgtactctacgtcttgctagatccgaaaagaaattcagaggtatcagagaaaaacgtgctagagaaaaagctgaggcagaagctgaaaagaaaaagtaa

SEQ ID NO: 4785 - DNA, 2118 bp, Artificial Sequence
  Optimized genes for Saccharomyces cerevisiae
atggctggtgaaacctttgaattccaggctgaaattactcaacttatgagcctgatcatcaatacagtctattccaataaggaaatctttttgcgtgagttgattagtaatgcctccgacgcattagacaagattagataccaagccttatcggatcctaaacaattagagacagaaccagatttattcattagaatcaccccaaagccagaagaaaaggttttagaaatcagagattccgggattggtatgactaaggccgaattgattaacaatttgggtactattgcaaaatccggaaccaaggctttcatggaagctttgtccgccggtgccgacgtctccatgatcggtcagttcggtgttggtttttattctctgttcttggtggccgatagggtccaggtcatctctaagaacaatgaagatgaacaatatatttgggagtcaaacgcgggtggctccttcaccgtcactttggacgaagttaacgagagaataggtagaggtacagttttgagattgtttttgaaagatgatcaattggaataccttgaagaaaagagaattaaggaagttataaaaagacattctgaattcgttgcctacccaatccaattgttggttactaaagaagtcgaaaaggaagtcccaattccagaagaagagaagaaggatgaggaaaagaaagatgaagatgataagaagcctaagctagaagaagttgacgaagaagaagaggagaaaaagcccaagactaagaaagtgaaggaagaggttcaagagttagaagaattaaacaaaacaaagccactgtggacccgcaacccatctgatattactcaagaagaatacaacgctttttataagagtatctctaacgactgggaagacccattgtacgttaagcacttcagtgtcgaaggtcaattggaattccgtgctattctattcatcccaaaacgtgctccttttgaccttttcgaatccaagaagaaaaaaaacaacattaagttatacgttcgtagagttttcatcactgacgaggctgaagatttgatcccagaatggctctcctttgttaagggtgttgtcgactctgaagacctacctttgaatctttctagagaaatgctacaacaaaacaagattatgaaggttattagaaagaacattgtgaagaaactcattgaagcttttaacgaaatcgcagaagactccgaacaattcgataagttctacagtgctttcgctaagaacattaagttgggtgtgcacgaagatacgcaaaacagagctgctttagctaagttgttgagatacaattctaccaagtccgtcgacgagttgaccagcttgaccgactatgtaactagaatgcctgaacatcaaaagaacatctactatatcactggtgaatctttaaaggctgtcgaaaagtctccgttcctagatgctttgaaagctaagaactttgaagttttgttcctgactgacccaattgacgaatacgccttcacccaattgaaggaattcgaaggtaagactttggttgatatcactaaggacttcgaattggaagagactgacgaagaaaaagctgaaagagaaaaggaaatcaaagaatacgaaccattaactaaagccttgaaggacattttaggtgaccaagttgaaaaagtcgtagtttcttacaagttgttggatgctcctgctgccattcgtaccggtcaatttggttggtcagctaatatggaaaggatcatgaaggcacaagctttaagagactcttctatgtcctcctacatgtcatctaaaaaaaccttcgaaatctctccaaagagcccaattattaaggagttgaaaaagagagtcgacgaaggtggtgctcaagacaagactgtaaaggatttaaccaacttgttgttcgaaactgccttgctaacctctggtttttctttggaagaaccaacgtcatttgcttctagaattaacagattgatctctctaggcttgaacattgatgaagatgaagagactgaaactgccccagaagcatcgaccgaagctccagttgaagaagttccagctgatacagaaatggaagaggtcgattaa

SEQ ID NO: 4786 - DNA, 303 bp, Artificial Sequence
  Optimized genes for Saccharomyces cerevisiae
atgactgtcaagaccggtattgctattggtctaaataagggtaagaaggtgacttctatgaccccagcccctaagatttcatacaaaaagggtgctgctagcaacagaacaaagtttgttagatccttggttagagaaattgctggtttatccccatatgagagaaggttgatcgatttgattcgtaactctggcgaaaagagagcccgtaaggtcgcaaaaaagagattgggttctttcactagagccaaagctaaagttgaagaaatgaacaacatcatcgctgctagtagaagacactaa

SEQ ID NO: 4787 - DNA, 669 bp, Artificial Sequence
  Optimized genes for Saccharomyces cerevisiae
atgaaattttttccactgttgttgctcattggtgttgttggttatattatgaacgttttgttcactacttggctacctaccaactacatgttcgacccaaagactttaaatgaaatctgtaactctgttatttccaaacacaacgctgctgaaggcctgtctactgaagatcttttacaagatgtgagagacgcattggcttcccattatggtgatgaatacattaacagatatgtcaaggaggaatgggtcttcaataacgctggtggtgctatgggtcagatgatcatattgcacgctagtgtatctgaatacctaatcttgttcggaaccgctgttggtaccgaaggtcacaccggggttcatttcgctgatgactacttcactattttgcacggtactcaaatcgccgccttgccatacgctactgaagcggaagtctacacgccaggtatgacacatcacttgaagaagggttacgccaagcaatactcaatgccaggtggttcctttgctttggagttagcccaaggctggattccttgtatgttgccattcggtttcttggataccttttctagcactttggacctatacaccttatatcgtactgtctaccttacagccagagacatgggtaaaaatttattgcaaaacaagaagttttaa

SEQ ID NO: 4788 - DNA, 2880 bp, Artificial Sequence
  Optimized genes for Saccharomyces cerevisiae
atgacggttaccactccttttgtcaacggtacctcttactgtaccgtcaccgcctattctgtccagtcctacaaggctgctattgacttctacacgaaatttttatctcttgaaaacagatccagcccagacgaaaactctaccttattgtccaacgactctatctctttgaagatcttactcagaccagatgaaaagattaacaagaacgtcgaagctcacttgaaggaattaaactcaattactaagactcaagactggcgttcccacgctactcaatctttggttttcaacactagtgatatcctagctgtcaaggatactttgaacgctatgaacgctccattacagggttacccaactgaattgttcccaatgcaattgtacaccttggatcccttgggtaacgttgtcggtgtcacctcaactaagaacgctgtttcaactaagccaacaccaccaccagctcctgaagcgtccgccgaatctggtttgtcttccaaagttcactcctacaccgatctagcttatagaatgaagaccacagatacttatccatctttgccaaaacctttgaaccgtcctcaaaaggctattgctgtaatgacttccggtggtgacgccccaggcatgaactccaatgtcagagctattgtgagaagcgctatcttcaaagggtgtagagccttcgtcgtgatggaaggttatgagggtttagttagaggcggtccagaatacattaaagaattccattgggaagacgttagagggtggtccgccgagggtggtactaacatcggaactgctcggtgtatggaatttaagaagagagaaggtagattattgggtgctcaacacttgattgaagccggcgttgatgcgttaatagtctgcggtggtgatggttcgttgactggtgccgacttgttcagatccgaatggccatcattaatcgaggaacttttgaaaacaaataggatctctaatgaacaatacgaacgtatgaagcatctaaatatctgtggtacagttggtagcattgataatgatatgtctacaactgatgctaccattggtgcatattctgctttggatagaatttgtaaagctattgattatgttgaagctactgctaactcccattctagagcttttgttgttgaagtaatgggtcgcaactgtgggtggttggccctcttggccggtattgctacttccgccgattacatctttattccagagaaaccagccactagttctgaatggcaggatcaaatgtgcgacatcgtgtctaaacacagatccagaggtaagagaacaaccattgtcgttgttgccgaaggtgctatcgccgccgacctgacccctatctctccaagtgacgtgcacaaggttttggttgatcgtttgggcttggatactagaatcactaccttgggtcacgttcaacgaggtggtactgctgttgcctacgatagaattttggctaccttgcaaggtctagaagccgttaacgctgtgttagaatcgacccctgacaccccatctccgctaattgctgtcaatgaaaacaagattgttaggaaaccattaatggagtcagtaaagcttaccaaggcagtcgccgaagctattcaagcaaaggatttcaagagagctatgtctttgcgtgatactgaatttattgaacacttgaataatttcatggccattaactctgcagaccataatgaaccaaaattgccaaaggataagcgtttgaagattgctattgtcaacgttggcgctcccgctggtggtattaactctgccgtctattctatggcaacttactgtatgtctcaaggtcacagaccatacgcgatctataatggttggtccggtttggctagacatgagtcagttcgttctttgaactggaaagacatgttaggttggcaatctagaggtggctctgaaattggtaccaacagggtcactcctgaagaggcagatttaggtatgatagcttactacttccaaaaatacgaattcgatggtttaattatcgtaggtggtttcgaagcttttgaaagtttgcatcaattggaaagagctagagagtcttacccagcctttcgtatcccaatggtactaattccagctactctgtcgaataacgttcctggtactgaatattcccttggttctgacactgctctgaatgctttgatggaatattgtgacgttgtcaagcaatccgcctcttcaacgagaggcagagctttcgttgtcgactgtcagggtggaaactctggttacttggccacatacgcctccttggcagttggtgctcaagtttcgtacgttccagaagaaggtatctcattagaacaattgtccgaagacattgaatacttggctcaatcctttgaaaaggctgaaggaagaggtagattcggtaagttgatccttaagagtacaaacgcttctaaagctctatccgccaccaagctagctgaagttataaccgctgaagcagacggaagattcgacgccaagccagcttatccaggtcacgttcaacaaggtggtttgcctagcccaatcgacaggacccgtgctactagaatggctatcaaggctgtcggtttcattaaggataaccaagctgctatcgccgaagccagagctgctgaggagaacttcaatgcagacgacaagaccattagcgacaccgcagctgttgtcggtgtcaagggttctcacgttgtctacaactccatcagacaattgtacgattacgaaactgaagtctctatgcgtatgccaaaggttatccattggcaagctactagattgatcgctgaccatttagttggtagaaagagagtggactaa

SEQ ID NO: 4789 - DNA, 804 bp, Artificial Sequence
  Optimized genes for Saccharomyces cerevisiae
atgtctcaaggtagaaaggctgctgaaagattggcaaagaagaccgttttgattacgggtgcctccgctggtatcggtaaggcaactgctttagagtaccttgaagcttccaacggtgacatgaagttgatcctggctgctagaagattagagaagttggaggaattgaaaaagaccattgaccaagaattccctaacgccaaggttcacgtcgcccagttggacatcactcaagccgaaaagataaagccattcattgaaaacttgccacaagaatttaaagatatcgatattttggtcaacaacgctgggaaggctttgggctctgaccgtgtgggtcaaatcgctaccgaagacatccaagatgttttcgataccaatgttactgccttgattaacattacacaggctgtcttacccatcttccaagctaagaactcaggtgacatcgttaacttaggctcgattgctggtagagatgcttacccaaccggttctatttactgtgccagcaaatttgccgtcggtgctttcactgactccctaagaaaggaattgattaacaccaagattagggtcatcttgatcgctccaggtttggttgaaactgaatttagtttggttagataccgtggtaatgaagaacaagccaaaaacgtctataaagatactactccattaatggctgatgatgtagctgacctaattgtgtatgcaacatctagaaaacaaaataccgttattgcggatactctcatcttcccaactaatcaagcttctcctcaccatatttttagaggttaa

SEQ ID NO: 4790 - DNA, 519 bp, Artificial Sequence
  Optimized genes for Saccharomyces cerevisiae
atggctcacttcaaggaataccaagttattggtcgtagactaccaaccgaatccgtccctgagccaaagttgtttagaatgagaattttcgcttctaacgaagttattgcaaagtctagatactggtactttcttcaaaaactgcataaggtcaagaaggcttccggtgaaattgtttctatcaaccagattaatgaagcccacccaactaaggtcaagaacttcggtgtatgggttagatatgatagtcgtagcggtactcacaacatgtataaggagatccgtgacgtttcaagagttgccgccgttgaaaccttataccaagatatggctgctagacatagagctagattcagatctattcacatcttgaaggtggctgaaatcgaaaaaactgctgacgtcaagagacaatacgttaaacaatttttgactaaagatttgaagttcccattgccacatagagtccaaaagtccactaaaaccttctcttataagaggccatcgacattttactaa

SEQ ID NO: 4791 - DNA, 180 bp, Artificial Sequence
  Optimized genes for Saccharomyces cerevisiae
atgaaattgtctcaagtggtcgtttccgctgttgccttcactggcttagtctccgctgctaactctagcaactcatcttccagtaagaatgctgctcaaccaatcgctggtttgaacaacggtaaggttgccggtgctgccggtgttgctctagcaggtgccttggcttttttgatttaa

SEQ ID NO: 4792 - DNA, 183 bp, Artificial Sequence
  Optimized genes for Saccharomyces cerevisiae
atggccaataaagttatccaattgcaaaagatttttcaatcttccactaaaccactatggtggcgtcacccaagatctgctttatacttgtaccctttctatgcaattttcgccgttgctgtcgttaccccattgttgtacatcccaaacgctattagaggtatcaaggctaagaaggcttaa

SEQ ID NO: 4793 - DNA, 594 bp, Artificial Sequence
  Optimized genes for Saccharomyces cerevisiae
atgatgcactttcgtaagaagtcttccatttcaaacacatctgatcatgatggtgcaaacagagcctcggatgttaagatcagtgaagacgacaaagcccgtttgaagatgaggactgcttctgttgctgatcctattctagacgctgttcaagaagctcaaccattcgagcaagctgcagacacctttcacgataacatgaatagacaaagctatttctccaatgaagaaggacatgtcttgtgtgacgttttcggccaacccatcactcaagccgatatttctaacccaactagagctagagacgaaagaccattagacaccatcagatctttcgaatacgccgtgtccggtgatccagtctgggctcaacaattggaaaccccaacctacggttttagagtcagacctgattttccagtattcggtgccgctgttacttacgacgctaacggtatgccacaacaagttggtggtgcgtcctctcaaatgtacggtgaacaagctgtctatcaaccacaacagcacgttcaaactgaagagaagcagaagaagaaaaaaaagggtttgttcggtagaatgaagaaaaagtaa

SEQ ID NO: 4794 - DNA, 1680 bp, Artificial Sequence
  Optimized genes for Saccharomyces cerevisiae
atgttgttcaagtctttatctaaactagcaaccgccgctgctttctttgccggtgtcgcgacagccgatgacgttccagcaatcgaagtggttggtaacaagttcttctattccaacaacggttcacaattctacattagaggtgtcgcttatcaagctgatacagctaacgagacgtcaggttctaccgtaaacgatcctttggccaactatgaatcctgctccagagatatcccatacttgaagaagttgaatacaaacgtgatcagagtttacgctattaatactactttggaccacagtgaatgtatgaaagcattgaacgacgccgatatttatgtcatcgctgacttagccgctccagctacttctattaatagagacgacccaacttggactgttgatttgttcaacagttacaagaccgtcgttgacaccttcgctaattacactaacgtcttgggtttcttcgcaggtaacgaagttactaacaactacaccaacaccgacgccagtgctttcgtcaaggctgctattcgtgacgtccgtcagtatatttctgataagaactacagaaaaatcccagttggttactcttctaatgacgatgaggacactagggttaaaatgaccgattactttgcctgcggtgatgacgatgtcaaggccgacttttacggtattaatatgtacgaatggtgtggtaagtccgattttaaaacctcaggttacgctgatagaaccgctgaatttaaaaacttgtctattccagtctttttctccgaatatggttgtaacgaggttaccccaagattatttaccgaggtagaagctctctacggttccaacatgacggatgtttggtccggtggcattgtttacatgtacttcgaagaaactaacaagtacggtttggtatcgattgatggtaatgacgtcaagactttagacgacttcaataattattcctctgaaatcaacaagatctcacctacctcagccaacaccaagtcttactctgctaccacttccgatgtcgcttgtccagccactggcaagtactggtcagcagctacagaactgccaccaactcctaatggtggtctatgctcttgtatgaatgctgctaactcttgtgttgtttctgatgatgtcgatagtgacgactacgaaacactattcaactggatctgtaacgaagtggactgttctggtatatctgccaacggtactgccggtaagtatggtgcttactctttctgtactcccaaagaacaattgtcctttgtcatgaacttgtactatgaaaaatccggaggttctaagtctgattgttccttctccggttctgctactctgcaaactgctactacacaagcatcctgttcctctgctttgaaggaaatcggttctatgggcactaactctgcctctggctcagttgacttaggttccggtaccgaatcttctactgcttccagtaacgctagcggttcgtcgtctaagagcaactcgggttcttctggttcttcttccagctcttcttccagttccgcctccagctcttcttctagcaagaagaacgctgctaccaatgtgaaggctaatttggcgcaagttgtttttacttccattatttcactttccatcgctgctggagttgggttcgctttggtttaa

SEQ ID NO: 4795 - DNA, 411 bp, Artificial Sequence
  Optimized genes for Saccharomyces cerevisiae
atggctagaactaaacaaaccgctagaaaatccactggtggtaaggcaccacgtaagcaattggcttccaaggctgcaagaaaatctgctccatctaccggtggtgttaagaaaccacaccgttacaagccaggtaccgtggccttaagagaaattagacgtttccaaaagagcactgaattattgatcagaaaattgcctttccaaagactggtcagagaaattgcccaagatttcaagactgacctaaggtttcaatcttcagctatcggcgccttacaagaaagtgttgaagcttatttggtctctttgtttgaggacacaaaccttgctgcgattcatgctaagagagttactattcagaagaaggatatcaagttggccagaagattgagaggtgaaagatcctaa

SEQ ID NO: 4796 - DNA, 852 bp, Artificial Sequence
  Optimized genes for Saccharomyces cerevisiae
atgtcccctccagtctattctgatatctcccgtaacatcaatgatttgttaaacaaggatttctaccatgccactccagccgcgttcgatgttcaaactaccacggctaatgggattaagttttccttgaaggcaaaacaacccgtcaaggacggtccattatctactaacgtcgaagccaagttgaatgataagcaaactggtcttggactaacacaaggttggtctaacaccaacaatttacaaaccaagctcgaattcgctaacttaactccaggtttgaaaaacgaattgattacctccttgacccctggcgttgctaagtctgctgttttgaatactacttttacacaaccattcttcactgcaagaggtgcttttgatttgtgtttgaagagtcctactttcgtcggtgacttgaccatggcccacgaaggtatcgttggtggtgctgaatttggttacgacatttctgctggttcaatttcgagatacgccatggctttgagctactttgctaaagactattctttgggtgccacactgaacaacgaacaaattactaccgttgatttcttccaaaacgttaatgctttcttgcaagtgggcgctaaagctaccatgaactgtaagttaccaaactctaacgtcaacatcgagtttgccactagatacctaccagatgcttcatctcaggttaaggctaaggttagcgactccggtattgttaccttggcttacaagcaactattgagaccaggtgtgactttgggtgtcggttcttccttcgacgctttaaaactttccgaaccagtacacaagttgggttggtctctgagtttcgacgcataa

SEQ ID NO: 4797 - DNA, 1230 bp, Artificial Sequence
  Optimized genes for Saccharomyces cerevisiae
atggtcaaggaaacaaagttctatgacatccttggtgttccagttacggctactgacgtggagattaagaaggcctatcgtaaatgtgctttgaagtaccatcctgacaaaaacccatcggaggaagctgccgaaaagttcaaagaagcttccgctgcttacgaaatcttgagtgatccagagaagagagacatttacgaccaattcggtgaagatggtctatccggtgctggtggtgctggtggttttcctgggggcggttttggttttggtgatgatatcttctctcaattcttcggtgcagggggtgctcaacgtccaagaggtccacaaagaggtaaggacatcaaacatgaaattagcgcttccttggaagaattatacaagggtaggaccgctaagttggccttgaataagcaaatcttgtgcaaagaatgtgaaggtagaggtggaaagaagggtgctgttaagaagtgtacttcttgtaatggccaaggtattaaatttgtcactagacagatgggacccatgattcaaagattccaaactgaatgcgatgtttgtcacggcaccggcgatattatcgacccaaaggacagatgtaagtcttgtaacggcaagaaggtcgaaaacgaacgtaagatcttggaagttcacgtcgaaccgggtatgaaggatggtcaaagaatcgtctttaagggtgaagcagaccaagccccagatgttatcccaggtgatgttgtcttcatcgtatctgaaagaccacataagtcatttaagagagatggtgatgacttagtttacgaagccgaaattgatttgttgacagctattgcaggtggtgaattcgccctggagcacgtttctggtgattggttaaaagtaggaattgttccaggtgaagtcatcgctccaggtatgagaaaggtcattgaaggtaagggtatgccaatccctaagtatggtggttacggtaacttgattattaaattcaccattaaattcccagaaaaccactttacctccgaggaaaacttgaagaaattagaagagattttgccaccaagaattgttcctgctataccaaaaaaagctaccgtcgacgaatgtgttctagctgatttcgaccctgctaagtacaatagaactcgtgcctctagaggtggtgccaactacgactctgacgaagaagaacaaggtggtgaaggtgtgcaatgtgcgtcccagtaa

SEQ ID NO: 4798 - DNA, 597 bp, Artificial Sequence
  Optimized genes for Saccharomyces cerevisiae
atgtcccaacctgtcgttgtcattgacgctaaggaccatctgttgggtagattagcctccactattgctaagcaggttttgaatggtcaaaagattgttgtcgtcagggccgaagcattaaacatctctggagagttcttcagaaacaagttaaagtatcacgatttcttgcgtaaggctaccgcctttaacaagactcgtggtccatttcatttcagagctccatcgagaattctatacaaggctatccgtggtatggtatctcacaagaccgcgagaggtaaggctgccctagaaagattgaaaatcttcgaaggtattccaccaccttacgataagaagaagagagtcgttgttccacaagcattgagagttttgagattgaagccaggtagaaaatacacaacccttggtaaattgtccactagtgtgggttggaagtacgaagatgttgttgccaaattggaagacaaaagaaaggtcagatctgctgaatattacgctaagaagagagccttcactaaaaaagtgtcttctgctagcgctgctgcttctgaatcagatgttgctaagcaattggcttcctttggctattaa

SEQ ID NO: 4799 - DNA, 1449 bp, Artificial Sequence
  Optimized genes for Saccharomyces cerevisiae
atgtctgcttttgtgagagttgttccaagaatatcccgttcttcagttttgaccagatcgttgagattgcaattgcgttgttacgcttcttatccagaacatactattattggtatgccagctttgagcccaaccatgacacaaggcaacctcgctgcttggacaaagaaagaaggtgatcaattgtccccaggtgaagttatcgcggaaatcgagactgataaagcccaaatggatttcgaatttcaagaagacggttatctggctaaaattttggttccagaaggtacgaaggacattcccgttaacaagccaattgctgtttacgtcgaggataaggcagacgtaccagccttcaaggatttcaaattagaagattctggttcagactccaaaacctccactaaggctcaaccagctgagccacaggctgaaaagaaacaagaagcccctgctgaagaaactaagacctccgctccagaagccaagaagtctgatgttgctgctccacagggtagaattttcgcttctccactagctaagaccatcgctttggaaaagggtattagcctaaaggacgtccacgggactggtccaagaggtagaatcaccaaggctgacattgaaagttacttggagaagtcttctaagcaatccagtcaaacctctggtgcagctgccgccactccagctgctgccacttcatccactaccgctggttcagcaccttctcctagctccaccgcgtcctacgaagacgtcccaatttctactatgagatctatcatcggtgaaagacttctacaatctacccaaggtattccatcttatattgtttcctctaagatcagtatctctaagttgttgaaattgagacaatctttaaacgccactgccaacgacaagtacaaactttccatcaacgatttgttggttaaagccattacggttgcagccaagagagtcccagatgctaatgcctactggttgcctaatgagaatgttatcaggaaattcaagaacgtcgacgtctcggtcgctgttgccacccctactggtttgttgacccctattgtcaagaactgcgaagccaagggattaagtcaaatctccaacgaaattaaggaattggtgaagagagctagaattaacaagttagctccagaagaatttcaaggtggtactatttgtatctctaacatgggcatgaacaatgcagttaatatgttcacttctatcattaaccccccacaatctactatcctggctatagctactgtcgaaagagtagctgttgaagatgctgctgcagaaaacggtttttccttcgacaatcaagtgaccatcactggtacatttgaccaccgtactattgatggtgctaagggtgccgagttcatgaaagaattaaagacagtcattgaaaacccattagaaatgttattgtaa

SEQ ID NO: 4800 - DNA, 1860 bp, Artificial Sequence
  Optimized genes for Saccharomyces cerevisiae
atggtcaaggagagtatcattgctttggctgaacacgccgcatctagggcttccagagtgattcctcctgttaagttggcttacaagaatatgttgaaagatccaagctctaaatataaaccatttaacgcgccgaagttgtccaacagaaagtggccagacaacagaatcactagagcaccaagatggttgtctactgacttgagagatggtaaccaatctttacccgatccaatgtctgtcgaacagaaaaaggagtacttccataagctggtcaatattggtttcaaggagattgaagtctcattcccaagtgcctctcaaaccgactttgatttcacgagatatgcagttgaaaacgctcctgacgatgtttccattcaatgcttggttcaatctagagaacacttgatcaaacgtacagttgaagctttaactggtgcaaagaaggccactatccacacctacttggctacttcggacatgttcagagaaatcgtttttaacatgtctagagaagaagccatttctaaggcggtagaagctactaagctagttagaaagctgactaaggacgatccatcccagcaagccactagatggagctatgaattctctccagaatgtttctcagatacacctggtgaattcgctgtggaaatctgtgaagctgttaagaaggcttgggaaccaacagaagaaaaccccatcatatttaacttgcctgctacagttgaggtcgcctcccctaacgtttacgccgatcaaattgaatattttgctactcatatcaccgaacgtgaaaaggtctgtatttctacccattgtcataacgacagaggttgtggcgttgctgcaaccgaattgggtatgttggccggtgctgatcgcgtcgagggttgtttattcggtaatggagaaagaactggtaacgtggatttggttactgtcgccatgaacatgtacacccaaggggtcagcccaaatttggatttctctgacttgacctccgttttagatgttgttgaaagatgcaacaagatcccagtttctcaaagagccccatatggtggtgaccttgtcgtttgtgcttttagcggttcccaccaagatgctatcaagaaaggtttcaacttgcaaaacaaaaaacgtgctcaaggtgaaacccaatggagaattccatacttaccattggacccaaaggatataggccgtgattacgaagctgttatcagagtaaactcacaatcaggtaagggtggtgccgcctgggttatcttacgttctttaggtttggacctaccaagaaatatgcaaattgaattctcctccgcagtgcaagaccacgctgattctttgggtagagaactaaagtctgacgaaatttctaagctatttaaggaagcttacaattacaatgatgaacaataccaagctatttccttggttaactacaatgttgaaaaatttggtaccgaaagacgtgtcttcactggtcaagtcaaggttggcgaccaaattgttgacattgagggtactggtaacggtccaatttcatctcttgtcgatgctttgagtaatttgctcaacgttagattcgctgtagctaactacaccgaacattctttgggttccggttcctcgacccaggctgcttcttacattcacttatcctatagaagaaacgctgataacgaaaaagcttacaaatggggcgttggagtctccgaagacgtcggtgacagttccgtcagggccattttcgctactatcaacaatatcatccactccggtgacgtctctattccatctcttgctgaggtggaaggtaagaacgctgctgcctcgggttctgcctaa

SEQ ID NO: 4801 - DNA, 345 bp, Artificial Sequence
  Optimized genes for Saccharomyces cerevisiae
atgagtgaagtgatcgaaggtaatgttaagattgatcgtatttcaccaggtgatggtgccaccttccctaagactggtgatttggttaccatccactacacaggtactttggaaaacggtcaaaagttcgactcctctgtagacagaggttctccattccaatgtaacattggtgtcggccaagttatcaagggttgggatgtcggtatcccaaaattatccgttggtgagaaggctagattgaccattcccggaccatacgcttatgggcctagaggttttccaggcttaattccaccaaactctactttggtttttgacgtcgaactattgaaagtcaactaa

SEQ ID NO: 4802 - DNA, 117 bp, Artificial Sequence
  Optimized genes for Saccharomyces cerevisiae
atgcaaccaattaccactgcctctacacaagctactcaaaaggataaatcctctgaaaagaaggacaactacatcatcaagggtttgttctgggatccagcttgtgttattgcttaa

SEQ ID NO: 4803 - DNA, 321 bp, Artificial Sequence
  Optimized genes for Saccharomyces cerevisiae
atggtcaacgttccaaagacccgtaaaacttattgcaaaggtaagacttgtagaaaacatacccaacataaggttactcaatacaaagctggtaaggcctctttattcgctcagggtaagcgtagatacgatagaaagcaatccggttttggaggtcaaactaaaccagtttttcacaaaaaggcaaagaccactaaaaaggtcgttttgaggttggaatgtgtgaagtgtaagaccagagcccaactaacattgaagagatgtaagcacttcgaattgggtggcgaaaagaagcaaaagggtcaagctttgcaattctaa

SEQ ID NO: 4804 - DNA, 723 bp, Artificial Sequence
  Optimized genes for Saccharomyces cerevisiae
atggttgccttgatcagtaaaaagagaaagttggtcgcagatggtgttttctatgctgaattgaacgagttttttaccagagagttagctgaagaaggttactctggtgtagaagtcagagttactcctacaaagaccgaagttatcatccgtgccactagaacccaagatgttttgggtgaaaatggtagaagaattaacgaactgactctattggttcaaaagagattcaagtacgccccaggtaccattgttttatacgctgaacgtgtccaagacagaggtctttctgctgttgcacaagctgaatctatgaaattcaagttattgaacggtttggccattagaagagctgcctacggggtcgtgcgttatgtcatggaatctggtgctaagggttgtgaagttgtcgtctccggtaagttgagagccgctagggccaaagctatgaagtttgctgacggtttcttgatccattcaggacagccagttaacgatttcatagatactgcaacgagacacgttctaatgagacaaggcgtcttaggcattaaggttaagatcatgagagacccagcgaaaagccgtaccggtcccaaggctttgccagatgccgtgactattatcgaaccaaaggaagaagagcctattttggctccatccgtcaaagactacagaccagctgaagaaactgaagctcaagctgaaccagtagaggcttaa

SEQ ID NO: 4805 - DNA, 600 bp, Artificial Sequence
  Optimized genes for Saccharomyces cerevisiae
atgtcggctaatgaattctattcttcaggtcaacaaggtcagtacaaccaacaaaacaaccaagaaagaactggtgctccaaacaatggtcaatacggtgccgataatggtaaccctaacggagaaagaggtttgttctctaccatcgttggtggaagcgccggcgcctacgctggttctaaggtttctaataatcactctaagttatccggtgtcttgggtgctattggtggtgcttttttggctaacaaaatttccgacgaaagaaaggagcacaagcaacaggaacagtatggtaactccaacttcggtggtgcaccacaaggtggtcataacaaccaccatagacaagataataacaacaacaacggcggctttggtggtcctggcggtccaggtggtcaaggtttcgggcgtcaaggtcctcaaggtttcggtggtccaggtccacaagaattcggcggtccaggtggtcaaggttttggtggtccaaacccccaagaatttggtggtccaggtggtcaaggttttggtgggccaaatccacaagaattcggtggtcaaggtagacaaggtttcaacggaggtagtagatggtaa

SEQ ID NO: 4806 - DNA, 1842 bp, Artificial Sequence
  Optimized genes for Saccharomyces cerevisiae
atggctgaaggtgtgttccaaggtgctattggtatcgatttgggtacaacgtactcctgtgtcgctacatacgaaagttctgttgaaattattgctaacgaacaaggtaaccgcgttactccttcttttgttgctttcaccccgcaagaaagattgattggcgacgccgctaagaaccaagctgcattgaacccaagaaacactgtctttgacgcaaaacgtctaatcggtcgtaggtttgatgacgaatctgttcagaaggacatgaaaacttggccattcaaagtcatcgatgtcgacggtaacccagtcatcgaagttcaatacctggaagaaacaaagactttctctccacaagaaattagcgccatggttttgaccaagatgaaggaaattgccgaagccaagatcggcaagaaagttgaaaaggctgttattactgtccctgcttattttaacgatgctcaaagacaagctaccaaggacgctggtgccatatccggtttgaatgtcttgcgtattattaacgaacccacggctgctgccattgcctatggtttgggtgctggtaagtctgaaaaggagagacatgttctaatttttgacctaggtggtggtaccttcgatgtctccttattgcatatcgctggtggtgtctatactgttaagtccacatctggtaacactcacttggggggccaagattttgatactaatttgttggaacacttcaaggctgaatttaaaaaaaaaaccggtttagatatttctgatgatgccagagccttgagacgtcttcgtactgctgcagaaagagctaaaagaaccttatcctctgtgactcaaaccactgtcgaagtagactcattgttcgacggggaggacttcgaatcctctttgaccagagctagattcgaagatttgaacgccgcactgttcaagtcaactttagagccagtggagcaagttttgaaggacgcgaagatctctaaatcccaaatagatgaagtagttttggttggtggttctactaggatcccaaaggttcaaaaattattgtctgacttcttcgatggtaagcaactcgaaaagtcgattaacccagatgaagccgtcgcttacggtgcagctgtacaaggtgctattttaaccggtcagtctacttccgacgaaaccaaggatttattgttgttggacgtggctccattgtcattgggagttggtatgcagggcgacatctttggtatcgttgttccaagaaatactaccgttccaacaattaagagaagaactttcaccaccgtctccgataaccaaactaccgtccaattccctgtctaccaaggagaacgtgtcaattgtaaagagaataccttactgggtgaattcgaccttaagaatatccctatgatgccagctggtgaaccagttttagaagccattttcgaggtcgacgccaacggtatcttgaaggtgactgctgttgaaaagtctactggtaagtctagtaatatcacaatctctaacgcagttggtagattgtcgagcgaagagatcgagaagatggttaaccaagctgaagaattcaaggccgctgacgaagcttttgctaagaaacacgaagccagacaaagactagaaagctacgttgcttctattgaacaaaccgttactgatccagtccttagttccaaattgaagagaggttccaagtctaagattgaagctgcgctatccgacgctttggctgctttgcaaattgaagatccatcagctgatgaattgagaaaggccgaagtcggtttaaaaagagtagttactaaggccatgtcttctagataa

SEQ ID NO: 4807 - DNA, 1302 bp, Artificial Sequence
  Optimized genes for Saccharomyces cerevisiae
atggtaaatgttgtcttgggttcccaatggggtgatgaaggtaaaggtaaactggtcgacctattagtgggtaaatatgatatcgttgcgagatgcgccggtggtaataacgctggtcatacaattgttgttgacggcgtcaagtacgattttcacatgttgccatccggtctagtcaacccaaattgtcaaaacttactgggtaacggtgttgttattcacgttccttctttctttaaagagttggaaaccttagaggctaagggcttgaagaacgctagatctagactttttgtctctagcagagctcacttggttttcgattttcaccaagtcactgataaattgagagaattggaactttcaggtagatcaaaggacggtaagaatattggtactaccggtaagggtattggtcctacttattccactaaggcctctagaagtggtttgcgtgtccatcatctagtcaacgaccaaccaggtgcttgggaagaattcgtagccagatataaaaggttattagaaacccgtagacaaagatacggtgacttcgaatacgattttgaggctaaattggcagaatacaagaagttgagagaacagctcaagccattcgttgttgattccgttgttttcatgcataacgctatcgaagccaagaagaagatcttggttgaaggtgctaacgcattaatgttggacatcgatttcggtacctacccatacgtcacgtcttccaacaccggaattggaggtgttttgactggtttgggaattccaccacgtaccatcgacgaaatctacggtgtcgtgaaggcctacactaccagagttggtgaaggcccattcccaactgaacaattaaacgaaaacggggaaaagctgcaaaccatcggtgctgagtttggcgtcaccactggtagaaagagacgttgtggttggttggacttggtagttttgaaatactctactttgatcaacggttacacatctttgaatatcactaagttggacgtgttggatactttcaaggaaatccccgtcgggatttcttactctattcaaggtaagaaattggacctattccctgaagatctaaacattttgggtaaggttgaagttgaatataaagttttgccaggttgggaccaagatataactaagattactaagtacgaagatttaccagagaatgctaagaagtatttaaagtatattgaagacttcgtcggtgtgccagttgaatgggtcggtacaggtcctgctagagaatcgatgcttcacaaggaaattaaataa

SEQ ID NO: 4808 - DNA, 561 bp, Artificial Sequence
  Optimized genes for Saccharomyces cerevisiae
atgggtattgaccacacttctaagcagcataagagatccggtcatcgtactgctccaaagagtgataatgtctacttgaaattgctggtcaagttatatacattcttggctagaagaaccgatgctcctttcaacaaggtagttttaaaggcattgtttctatccaagattaatagaccaccagtttctgtttcaagaattgccagagctttgaagcaagaaggtgctgccaacaagaccgttgtcgtcgttggtaccgttacggatgacgctagaatcttcgaattccctaagaccactgtcgctgctttgagattcaccgccggtgcgagagccaaaatcgttaaagcaggtggtgaatgtatcacattagaccaattggctgttcgtgccccaaaagggcaaaacactttgattctacgtggccccagaaacagcagggaggctgtgagacactttggtatgggtccacacaagggtaaagctccaagaattctttctactggtagaaagttcgaacgtgctagaggtagaagaagatccaagggatttaaggtttaa

SEQ ID NO: 4809 - DNA, 435 bp, Artificial Sequence
  Optimized genes for Saccharomyces cerevisiae
atggccggtgtttctgttagagacgtcgcagctcaggatttcatcaacgcttatgcctccttcctacaacgtcaagggaagttggaagtcccaggttatgttgacattgtgaagaccagttctggcaacgaaatgccaccacaagacgctgaaggttggttttacaaaagagctgcttccgttgcccgtcacatttacatgagaaagcaagtcggtgttggaaagttgaacaagttgtacggtggtgccaagtctagaggtgtcagaccatacaagcatattgatgcttccggtagcattaatagaaaggtattgcaagctttggaaaaaatcggtatcgttgaaatttctcctaaaggtggtagaaggatctcagaaaacggtcaaagagatttagacagaattgctgctcaaactttagaagaggatgaataa

SEQ ID NO: 4810 - DNA, 894 bp, Artificial Sequence
  Optimized genes for Saccharomyces cerevisiae
atgtccggtccaccacctccatacgaagagcaatcttcccatctatatggtcaacctgcttcttctcaggacggtaacgcttttataccagaagatttcaagtacagtacggtggttatcagctgtgaaccaattattcgtcaaagattcatgcataaggtctactctctacttagttgtcaattgttggcttccttgtccttctgctactgggcctcggtttctacttctctccaaaattttattatgagccacattgctttattctacatttgtatggtcgtttcattggtctcttgtatctggttggcagtctcaccaagacctgaagactacgaagcttcagttccagaacccttattgacaggttcttctgaagaaccagctcaagaacaaagaaggttgccatggtacgttttatcttcttacaaacaaaaactaacccttttgagtattttcactttatccgaggcttattgtttgtcgcttgtcaccttggcctacgataaggacactgttttatctgctttattgatcaccactattgttgtagtgggagtttccttgaccgccttgtccgaaagattcgaaaacgtcttaaattccgcaacatctatctattactggttgaactggggtttatggatcatgatcggtatgggtctgactgctttattgttcggctggaacactcactcctctaagttcaatttgttgtatggttggttgggtgccattttgtttaccgcgtacctgtttattgatactcaattgatcttcagaaaggtttatccagatgaagaagtccgttgtgctatgatgttgtacttggacatcgttaacttgtttttgtctattttgagaatcctagctaactccaacgacgataactaa

SEQ ID NO: 4811 - DNA, 1146 bp, Artificial Sequence
  Optimized genes for Saccharomyces cerevisiae
atgaaagaaaacgaattaaaaaacgaaaagtctgtcgatgttttatcctttaagcaattggaatcacagaagatcgtcttgcctcaagacctattcagatcctctttcacctggttctgttacgaaatttataaaagcttggcttttagaatctggatgttgttgtggttaccattgtctgtttggtggaagttatcaaataactgtatctaccccttgattgtgtctctcttggtgctttttttgggtccaatcttcgtcctagtcatttgtggtttgtctagaaagagatccttgtccaagcagcttatccaattttgcaaggaggttaccgaaaacactccatcttccgaccctcacgattgggaagtcgttgctgctaacttaaactcttacctatacgaaaacaaggcttggaacacaaagtacttctttttcaatgctatggtttgtcaagaagcctttagaactactttgttggaacctttctcgttgaaaaaggacgaagcggctaaagtcaagtctttcaaggactctgtaccatatatcgaagaggccctaggtgtctacttcagagaagtcgaaaagcaatggaagcttttcaacagtgaaaagtcttggtctccagtaggattggaggatgccaagttgccaaaagaagcttacagattcaaactgacttggttcctgaagagaatcagcaacatcttcatgctgattccattcttgaattttttgtgttgtatttacgtttcccgtggtatgtgtttgttgttgagaaccttctacttaggttggatattgttcatgttggttcaaggtttccaaaacatgcgtatgatcgttttgagtgttaagatggagcacaagatgcaattcttgtctactattattaatgaacaagaatctggtgccaatggctgggatgaaattgccaagaaaatgaataggtacttattcgagaagaaggtttggaaaaacgaagaatttttttttgatggtattgactgtgaatggtttttctctcattttttctatcgtgttttgtccgcaaagaaatctatgagagctttaagtctaaacgttgaattatggccatatattaaggaagcacaattatcctgctccgaagaatcattggcttaa

SEQ ID NO: 4812 - DNA, 1440 bp, Artificial Sequence
  Optimized genes for Saccharomyces cerevisiae
atgtctgctattttgtccactacttcaaagtcttttttatcgagaggttcaactcgtcaatgtcagaacatgcaaaaagctcttttcgctttgttgaacgctcgtcactactcttctgcatcagagcaaactctaaaggaaagattcgctgaaattattccagccaaggccgaggaaatcaagaagtttaaaaaggaacacgggaagaccgtcattggtgaagttttattggaacaagcttacggtggaatgagaggtattaagggtttggtctgggagggttctgttttggacccagaagaaggtatcagatttagaggcagaactatcccagaaattcaaagagaattaccaaaagccgagggttctactgaaccattaccagaagctttgttctggttgttgttgacaggtgaaataccaaccgacgctcaagttaaggccctaagtgcggacttggctgccagaagtgaaatcccagagcatgttattcaattgttggattctttaccaaaagatttgcatccaatggctcaattttccatcgctgttaccgccctggaatccgaaagcaagttcgctaaggcatatgctcaaggcgtctccaagaaagaatattggtcttacaccttcgaagactctttagatttacttggtaaattgccagtaattgcatctaagatctataggaacgttttcaaggatggtaagattacgtctaccgacccaaacgccgactacggtaagaacctcgctcaactattgggttatgaaaataaggatttcatcgatctgatgagactgtacttaacaatccactccgatcacgaaggtggtaacgtttccgcccataccacccacttggttggtagtgctttgtcgagcccatatttgtctttagccgctggtttgaacggtttggctggtcctttgcatggtagagctaatcaagaagttttggaatggttattcaaattgagagaagaagtcaagggtgattactcaaaggaaactattgaaaagtacctatgggatactttgaacgctggtcgtgtcgtgcctggttacggtcacgccgtattgcgtaaaactgacccaagatacactgctcaaagagaattcgctttgaaacatttcccagactacgaattgtttaagctagtttctaccatttacgaagttgccccaggtgtcctaactaaacacggtaagaccaagaatccctggcctaacgtcgactcccattccggcgtccttttgcagtactatggtttgactgaagcttctttctacacagtgttgttcggagttgcaagagctatcggtgttttgcctcaattgattatcgatagagctgtcggtgctcctatcgaaagaccgaagtctttttctactgaaaagtacaaggagttagttaagaaaattgaatccaagaattaa

SEQ ID NO: 4813 - DNA, 6702 bp, Artificial Sequence
  Optimized genes for Saccharomyces cerevisiae
atgtctgaggagtctttatttgaatcttccccacagaaaatggaatacgaaattactaactacagcgagaggcatacagaattgccagggcatttcattggtttgaatactgtcgacaagttggaggagtctccacttcgtgacttcgttaagtctcacggtggtcacaccgtcatctctaagatcttaatcgctaacaacggtatcgccgctgttaaggaaattagatctgttcgtaagtgggcttacgagacttttggtgacgatagaactgttcaattcgttgctatggcgacccctgaagacttggaagccaacgccgaatacattagaatggctgatcaatacatcgaggttccaggcggtaccaataacaataactacgctaacgtggacctgatagttgatatcgccgaacgtgctgatgttgatgccgtttgggcgggttggggtcatgcctctgaaaaccctttgctgcctgaaaagttatcccaatccaaaagaaaggttatctttattggtccaccaggcaatgctatgcgttccttgggagataaaatctcaagcacaattgttgcccaatccgcaaaagtcccttgtattccatggtcggggactggtgttgataccgtccacgtcgacgaaaagaccggtctggtctccgtagacgacgacatttaccaaaagggatgttgtacctctccagaagatggtctgcaaaaggctaaaagaatcggtttcccagtcatgatcaaggcttctgaaggtggtggtggtaaaggtatcagacaagtggaaagagaagaggacttcattgcattataccaccaagctgctaacgaaatcccaggttctccaatttttatcatgaagttggccggtagagctagacatttggaagttcaattgttggccgatcagtatggtaccaacattagcttattcggtcgtgactgttctgtccaaagaagacaccaaaaaattattgaagaagccccagttaccattgctaaagctgaaacttttcatgaaatggaaaaggctgctgtcagattaggtaagctagttggttacgtttcagccggcactgttgaatatttatactcccacgatgacggcaaattctacttcttggaattgaacccacgtctccaagttgaacatcctacaactgaaatggtctcgggtgtgaacttgccagctgcgcaattgcaaatcgcaatgggcattccaatgcatagaatctctgacattaggactttatacggtatgaacccacactccgcttcggaaattgatttcgaatttaagactcaagatgccactaagaagcaaagaagaccaattccaaagggtcactgcactgcttgtagaattacatctgaggacccaaatgatggtttcaagccttccggtggtacgttgcacgaattgaattttagatcatcctctaacgtttggggttacttctctgttggtaacaacggaaatatccattcattttctgattcacagtttggtcacatcttcgctttcggtgagaacaggcaagcctccagaaaacatatggttgtcgctttgaaggaattgagtattagaggtgactttagaactaccgtagaatacttgatcaagctattagaaactgaagacttcgaagacaacaccattaccactggctggttagatgatctaatcacccacaaaatgaccgctgagaaaccagatccaaccttagctgttatttgcggcgcagctactaaggctttcttggcttctgaagaagctagacacaagtacatcgaatcattgcagaagggtcaagtcctaagcaaggatttactccaaactatgttccctgttgatttcattcacgaaggtaagagatataaatttaccgttgctaaatctggtaacgatagatatactttgttcataaacgggtctaaatgtgatataattctacgtcaattgtccgacggtggtttgttgattgctattggtggtaagtcacataccatttattggaaagaagaagtcgctgccactagactaagtgttgactctatgactaccttgctggaggttgaaaacgacccaactcaattgagaacgccttccccaggtaagttagttaagttcttggttgagaatggtgaacatattatcaagggtcaaccatatgctgaaattgaagttatgaagatgcaaatgcccttagttagtcaagaaaacggtattgttcaattgttgaagcaacccggttctaccatcgtagctggtgacattatggctattatgaccttggacgatccatcaaaggttaagcatgctttgccattcgaggggatgttacctgatttcggttctcctgttatcgaaggtactaaaccagcttacaagttcaagtctttggtttccaccctagagaacattctcaagggttatgacaatcaagtcattatgaacgcttccttacaacaattgatcgaagttttgagaaatccaaaactaccctacagtgaatggaagttacacatctccgctctacactcgagattgccagctaaattagatgagcaaatggaagaattagtagctagaagcttaagaaggggtgccgtgtttcctgccagacagctatctaagttgatcgacatggctgttaagaacccagaatacaacccagacaagttgttgggtgccgttgtcgaaccacttgctgatattgcacacaagtactccaacggtctagaagcacatgaacattcgattttcgtccatttccttgaagaatactacgaagttgaaaagctgttcaatgggccaaacgtgcgtgaagagaacattatcttgaagttacgtgacgaaaatccaaaggacttggataaggtcgcccttacagttttgtctcatagtaaggtctccgctaaaaacaacctaattctagctatactcaagcactatcaaccattgtgtaagttgtctagcaaggtctctgccatttttagtacaccattacaacatattgtcgaattggaatccaaggccaccgctaaagtagctcttcaagctagggaaattttgattcaaggtgctttgccatccgtcaaagaaagaacagagcaaattgagcacatcttgaagtcctctgttgttaaggtggcttacggttctagcaacccaaaaagatctgagccagatttaaacattttgaaagacttaatcgactccaactacgtcgttttcgatgttttattgcaattcttgactcatcaagatccagtcgtcactgctgctgccgcccaagtctacattagaagagcatatagagcttatacgatcggggatatcagagtccacgaaggagttaccgttcctattgttgaatggaagtttcaattaccttccgccgctttcagtacttttcctactgttaagtctaaaatgggtatgaacagagctgtttccgtttcggacttgtcttacgtcgctaattctcaatcctctccattgagagaaggtattttgatggccgtcgaccacttggatgacgttgacgaaattttgtctcaatctttggaggttatcccaagacatcaaagctcctctaacggtccagctccggacagatctggttcctctgcctctttgtcaaatgtcgctaacgtgtgcgtcgcctctactgaaggttttgaatctgaagaagaaattttggtcaggttgcgtgaaattttggatcttaacaagcaagaacttatcaacgcgtctattcgtagaatcaccttcatgttcggtttcaaagacggttcttacccaaagtactatactttcaatggtccaaactacaatgaaaatgaaaccattagacacatagagccagctttagccttccaattggaattgggtcgcttgtctaactttaatattaagccaatttttactgacaatagaaacattcacgtgtatgaagctgtttctaagacctcaccattggacaaacgtttttttactagaggcatcatcagaaccggtcacatccgtgatgatattagtatccaagaatacttaacttccgaagctaatagattaatgtccgacattctggacaatctggaagtaaccgatacttctaactccgacctaaaccatatatttattaactttattgctgtctttgacatctctccggaagatgtagaggctgccttcggtggtttcttggaaagattcggcaaacgtttgttgagattgagagtgtcttctgccgaaattagaattattatcaaggatcctcaaactggtgctccagtccccttgcgtgctttaattaacaatgtttccggttacgttattaagaccgaaatgtacactgaagtcaagaatgctaaaggagaatgggttttcaagtctttgggtaagccaggctcaatgcacttgcgtccaatcgcaactccatacccagtcaaggaatggttacaaccaaagagatataaggctcacttgatgggtacaacttacgtctacgacttcccagaattgttcagacaagcctcttcttcccaatggaaaaacttctctgctgacgtcaagttgactgacgattttttcatcagtaacgaattgatcgaagacgaaaacggtgaactaactgaagttgaaagagaaccaggtgccaacgctattggtatggttgcttttaagatcactgtcaaaaccccagaatacccaagaggtagacaattcgtcgttgtcgccaacgacattaccttcaaaatcggttccttcggtcctcaggaagatgagttctttaacaaggtgactgaatatgcccgtaagagaggtatcccaagaatctatttagcagcaaacagcggtgcgagaatcggtatggctgaagaaatcgtcccacttttccaggttgcttggaacgatgccgctaacccggacaagggtttccaatacttgtacttgacttccgaaggtatggaaaccctaaagaagtttgacaaggaaaactctgtcttaaccgaaagaactgttatcaacggtgaagaaaggtttgttattaagactatcattggttcagaagatggcctaggtgttgaatgtttgagaggttccggtttgatcgcaggtgctacttcacgtgcctaccacgatattttcacgatcaccttggttacatgtagatccgttggtattggtgcttacttggtcagattgggtcaaagagccattcaagttgaaggtcaaccaattatccttaccggtgccccagctattaataagatgttgggtagagaagtctatacctctaacttgcaattgggtggtacccaaatcatgtacaacaacggcgtttctcatttgaccgctgttgacgatctcgcaggagtcgagaagatcgtggaatggatgtcttatgtaccagctaagagaaatatgccagtgccaatcttggaaacgaaggatacatgggatagaccagttgactttacccctactaacgacgaaacatacgatgtcagatggatgattgaaggtagagaaacagaaagtggcttcgagtacggtctttttgataagggttcattcttcgaaactttgtccggttgggctaagggtgttgttgttggtagagctagattgggtggtattccattgggcgttattggtgttgaaactagaaccgttgaaaacttgattccagctgaccctgctaacccaaactcagccgaaactttgattcaagaacctggtcaagtatggcaccctaactccgccttcaaaacagcacaagcaattaatgacttcaacaacggtgaacaattgcccatgatgatcttggccaattggaggggtttctctggtggtcaacgtgatatgtttaatgaagtcttgaaatatggatctttcattgtcgacgctctagttgattataagcaaccaatcataatatacatccctcccactggtgagttacgaggtggttcctgggtggtcgttgatcctaccatcaatgctgatcaaatggaaatgtacgccgacgttaacgctcgtgcaggagtattggaaccacaaggtatggtgggtatcaaattcagaagagagaagttgttggatactatgaaccgtctagatgataagtacagagaactgcggtctcagttgtctaacaagtccctagctccagaagtccaccaacaaatctccaagcaattagctgacagagaaagagaacttttgccaatctatggccagatctccctgcagttcgctgatttgcatgatagatcttcgcgtatggtcgctaagggagtcatctctaaggaattagaatggactgaagctagaagatttttcttctggagattgcgtagaagattgaacgaagaatacttaatcaaaagattatctcatcaagttggtgaagccagtagattggaaaagattgctcggattagaagttggtacccagcatctgtcgatcacgaagacgaccgccaagttgctacctggatcgaggaaaactataagacattagacgacaaactgaaaggtttgaagttggaatcctttgctcaggatttagccaagaagattagatccgatcacgataatgctatcgatggtcttagcgaagtcatcaagatgttgtctactgacgataaggaaaaattgttgaagactttgaagtaa

SEQ ID NO: 4814 - DNA, 765 bp, Artificial Sequence
  Optimized genes for Saccharomyces cerevisiae
atgtcaggttacgatagagcccttagcattttctccccagacggtcacatctttcaagttgaatacgctttagaggcagtgaagagaggtacctgtgctgtcggtgtaaaaggtaagaattgtgtagttttaggttgtgaaagaagatctactctaaagttgcaggacaccagaataactccttctaaggtctctaagattgactctcatgttgttctatccttctccggtttaaacgctgactctagaatcttgatcgaaaaggcccgtgttgaagctcaatctcatagattgactttggaagatcccgtcactgttgaatacttgactagatacgttgctggtgttcaacaaaggtacacccagtctgggggtgttagaccatttggcgtttccacattgatcgccggtttcgacccaagagatgacgaaccaaagttgtatcaaaccgaaccatctggtatttattcatcctggtctgctcaaactatcggtagaaacagtaagaccgtcagagaattcttagaaaagaactatgatcgtaaggaacctccagctactgtcgaagaatgcgttaagttgacggttcgtagtttgctggaggtcgtccaaaccggagccaaaaatattgaaattactgtcgtcaagccagattccgatattgtggctttgtcttcggaagaaattaaccaatacgttacacaaatcgagcaagaaaagcaagagcaacaagaacaagataagaaaaaaaaatctaaccactaa

SEQ ID NO: 4815 - DNA, 321 bp, Artificial Sequence
  Optimized genes for Saccharomyces cerevisiae
atgaagtatcttgctgcttacttgttgttgaacgctgctggtaatactccagatgctactaagatcaaggctatcttggaaagcgtcggtattgaaattgaagatgaaaaggtttcatctgtcttgtctgctctagagggtaaatccgttgatgaattaattaccgagggcaacgaaaagctggctgctgttcctgctgcaggtccagcctctgccggtggtgcggcagccgctagtggtgatgccgctgccgaagaagaaaaagaagaagaagccgctgaagagtccgacgacgacatgggatttggtttgttcgactaa

SEQ ID NO: 4816 - DNA, 429 bp, Artificial Sequence
  Optimized genes for Saccharomyces cerevisiae
atgtcccaagccgttaacgctaaaaagagagtgttcaagacccattcttacagaggtgtcgatttggaaaagttattggaaatgagtaccgaagacttcgtcaaattggctcccgctcgtgtcagaagaagattcgctcgtggaatgacttctaagccagccggttttatgaagaagttaagagctgctaagttggccgcacctgagaacgaaaaaccagctcctgttagaacccacatgagaaacatgattatcgtcccagaaatgattggttccgttgttggtatctacaatggcaaggctttcaaccaagtagaaatccgtccagaaatgttgggtcactacctaggtgaattttctattacatatactccagttagacatggtagagctggtgccactacttcaaggttcattccactgaagtaa

SEQ ID NO: 4817 - DNA, 1263 bp, Artificial Sequence
  Optimized genes for Saccharomyces cerevisiae
atgagcaagggtaaggtttgcctggcttactccggtggtttggatacctctgtcattttggcttggctgttggatcaaggctatgaagttgttgctttcatggcaaatgtaggtcaggaagaagacttcgatgcagccaaggaaaaagctttaaaaatcggggcttgtaaattcgtgtgtgttgactgtagagaagactttgtcaaggatatcttgtttccagctgtccaagttaacgctgtttacgaagatgtttatttgctaggtacctccttagccagaccagtcattgctaaggctcaaattgatgttgctaagcaagaaggttgtttcgccgtgtcccacggatgtacgggtaaaggtaacgaccaaattcgtttcgaattgagtttctacgcattgaagccagacgtcaagtgcatcaccccgtggagaatgcctgagttcttcgaaagattcgctggtagaaaggatttgctagattatgccgctcaaaagggtatcccagtcgcccagaccaaggcgaaaccctggtctactgacgaaaaccaagcccacatctcttacgaagctggtattttggaagacccagatactaccccaccaaaggatatgtggaaactaatagttgacccaatggacgctccagaccaaccacaagacttgaccattgacttcgaaagaggtttgccagttaagttgacttacactgacaataagaccagtaaggaagtctctgtcaccaagccattggatgttttcttggctgcttctaacttagccagagctaatggtgtaggtaggatcgatattgttgaagacagatacatcaacttgaagtcaagaggttgttacgaacaagcccctttgactgttttacgtaaagctcatgttgatttggaaggtctaactttggataaggaggttagacaattaagagactcttttgtcactcctaactattccagattgatctataacggttcgtactttactccagaatgtgaatacattcgttctatgattcaaccttcacaaaattccgtgaacggtaccgttagagtccgtctttacaagggcaacgtcattattctcggtagatctactaaaactgaaaaactttacgatccaaccgagtcttctatggatgagttgacaggttttttaccaacagacactactggctttattgccatccaagctatcagaattaagaagtacggtgaatccaagaagacaaagggagaagaattgactttataa

SEQ ID NO: 4818 - DNA, 1047 bp, Artificial Sequence
  Optimized genes for Saccharomyces cerevisiae
atgtccatcccagaaacccaaaagggtgttattttctacgaaagccatggaaagttggagtataaggatattcctgttccaaagcctaaggccaatgaactattgatcaacgttaagtactccggggtttgtcacacggatttacacgcatggcacggcgattggccactccccgttaagttgccattagttggaggtcacgaaggtgccggtgttgtcgttggtatgggtgaaaatgtcaagggttggaaaattggtgactacgctggtattaagtggttaaatggctcatgtatggcttgcgaatattgtgaattgggtaacgagagtaactgcccacatgctgacttgtcgggttacacacacgacggttcttttcaacagtatgcaaccgctgatgccgtccaagccgctcatatccctcaaggcactgacttggctcaagttgccccaatcttgtgtgctggcattactgtctacaaggctttgaagtctgctaacctgatggctggtcattgggttgctatttctggtgctgccggtggtcttggttctttggctgtgcaatatgctaaggctatgggttaccgtgttctaggtattgatggtggtgaaggtaaagaagaattgttcaggtcaatcggaggtgaagtttttatagactttactaaggagaaagatattgtcggtgcagtcttgaaagcgactgacggtggtgcacacggtgtgatcaacgtatccgtttctgaagccgctattgaagcttctactagatacgttagagccaacggtactacagtcttagtcggtatgccagctggtgccaagtgttgttccgatgttttcaaccaagtcgttaaatccatctctatcgttggttcttacgtaggtaacagagctgacaccagagaagctttggatttcttcgctcgtggtttagttaagagtccaattaaagtcgtcgggttgtctaccttgccagaaatttacgaaaagatggaaaaaggtcaaatcgtcggtagatacgtggttgacacctccaagtaa

SEQ ID NO: 4819 - DNA, 342 bp, Artificial Sequence
  Optimized genes for Saccharomyces cerevisiae
atgtccgaaattcaaaataaggctgaaacagctgcccaagacgttcaacaaaaactagaagaaaccaaagaatctttgcaaaacaaaggtcaagaagttaaggaacaagctgaggcttctattgataacttgaagaacgaagctactccagaagctgaacaagtgaagaaagaagaacaaaacatcgctgatggtgttgaacagaagaagactgaagctgcaaacaaagtcgaagaaaccaagaagcaggcctctgccgccgtctcagagaagaaggagactaaaaaggaaggtggtttcttgaagaagttaaatagaaagattgcttccatctttaactaa

SEQ ID NO: 4820 - DNA, 561 bp, Artificial Sequence
  Optimized genes for Saccharomyces cerevisiae
atgggtatcgaccacacctctaagcaacacaagagatctggtcatcgtactgctccaaagtctgacaacgtttatttgaaattgttggttaagctatacactttcttagccagaagaactgatgcaccatttaacaaggttgttttaaaggctctgtttttatccaagatcaatagaccacccgtcagcgtttccagaatcgctagagctttgaaacaggagggtgctgctaacaaaacggttgttgtcgtcggtactgttacagatgacgcaagaattttcgaattccctaagaccaccgtggcggctcttcgttttactgccggtgccagagccaagattgttaaagccgggggtgaatgtattacattggatcaattggctgtcagagctccaaagggacaaaataccctaattttgagaggtccacgtaacagtagagaagctgtcagacatttcggtatgggtcctcacaagggcaaggctccaagaattttgtcaaccggtcgtaagttcgaaagagctagaggtaggagaagatccaaaggtttcaaggtataa

SEQ ID NO: 4821 - DNA, 429 bp, Artificial Sequence
  Optimized genes for Saccharomyces cerevisiae
atggcgccatccgccaaggctactgctgctaagaaggccgttgtcaagggtaccaatggtaagaaggctcttaaggttagaacctctgcaactttcagattaccaaagaccctgaagttagcccgtgctccaaaatatgcttcaaaggctgttccacactacaacagattggactcttataaggtcatcgaacaacctatcacatccgaaactgctatgaagaaagtggaggatggtaatattttggtttttcaagtttctatgaaggcaaacaagtaccaaattaaaaaagctgtcaaagaattgtatgaagtagatgttctaaaagttaacaccttggtcagaccaaacggtactaagaaggcctacgtcagattgactgctgactacgacgctttggatatcgccaacagaattggttacatttaa

SEQ ID NO: 4822 - DNA, 321 bp, Artificial Sequence
  Optimized genes for Saccharomyces cerevisiae
atgtccaccttgttaaagtctgctaagtctatcgttccattaatggatagagtattggttcagcgtatcaaggcccaagctaagacagcttctggtttgtacttgccagaaaagaacgtcgaaaaattgaaccaagctgaagtcgttgcagtgggtcctggtttcactgatgctaacggcaataaagttgttccacaagttaaagttggtgatcaagtcttgattccacaatttggtggttctactattaagctaggtaacgacgacgaggtcattctgttcagagatgccgaaattcttgccaagatcgctaaggactaa

SEQ ID NO: 4823 - DNA, 186 bp, Artificial Sequence
  Optimized genes for Saccharomyces cerevisiae
atggatggtatgtttgccatgccaggtgcagctgctggtgctgcttctccacagcaaccaaaatctagattccaagctttcaaggaatccccattatacactatcgctctaaacggtgcctttttcgtcgccggtgttgctttcattcaatctccattgatggacatgttggctcctcaattgtaa

SEQ ID NO: 4824 - DNA, 1164 bp, Artificial Sequence
  Optimized genes for Saccharomyces cerevisiae
atgtctcatcgtaagtatgaagctcctagacacggtcacctaggttttttaccaagaaagagggccgcttcgattagagctcgcgtgaaagctttccctaaggatgacagatccaagccagtcgccttgacctcctttttgggctataaggccggtatgaccactattgttagagaccttgatagaccaggttctaaattccataagagagaagttgttgaagccgtgacagtcgttgacactccacctgttgttgtagttggcgtcgtcggttatgttgaaactccaagaggcttgcgttctttgaccactgtttgggctgaacacttgagtgatgaggtcaagaggagattctacaagaactggtataagtcaaagaagaaggctttcacgaagtactccgctaagtacgctcaagatggtgctggtattgaaagagaattggctagaatcaagaagtacgcttctgtcgtcagagttctggttcacactcagattagaaaaactccattagcccaaaagaaggcccatttagctgaaatacaattgaacggtggttccattagtgaaaaagtcgattgggcaagagagcacttcgaaaaaacagtcgctgtagattccgtcttcgagcaaaacgaaatgatcgatgcgattgctgttaccaagggtcacggttttgaaggtgtgacccatagatggggaaccaagaagttgcccagaaagactcacagaggtttgagaaaggttgcttgtattggtgcctggcacccagctcacgttatgtggtcagtcgcaagagctggtcaaagaggttaccattctcgtacctctatcaaccataagatctacagagttgggaaaggtgacgatgaagctaacggtgcaacttccttcgacagaactaagaagactattactccaatgggtggattcgttcactacggtgaaatcaaaaatgacttcattatggtcaagggttgtatcccaggtaacagaaagcgtatcgttaccttgagaaagtctctatacaccaatacttctcgtaaagctttggaagaagttagcttgaagtggatcgacactgcctctaaatttggtaaaggtcgttttcaaacaccagccgaaaaacatgctttcatgggtaccttgaagaaagacttataa

SEQ ID NO: 4825 - DNA, 573 bp, Artificial Sequence
  Optimized genes for Saccharomyces cerevisiae
atgtctgcccctcaagctaaaatcttgtcccaagctccaaccgaattggaattgcaagttgctcaagccttcgttgaattagaaaacagctcgccagaattgaaggctgaactaagaccattacagttcaagtccattagagaaattgacgtcgccggtggtaagaaagctcttgccatatttgtgccagttccttctttggcaggtttccacaaggttcaaactaagttgactagagaattggaaaagaaatttcaagatagacatgttatcttcttggctgaaaggagaattctgccaaagccaagtagaacctctagacaagttcaaaagcgtccaagatctagaactttgactgctgtccacgataagattttggaagatttggttttccccaccgagatcgtcggtaagcgtgtgagatatttggtcggtggcaataaaatccaaaaggttttattggattccaaggacgtccaacaaattgactacaaattagagtctttccaagctgtatacaacaagctaacaggtaagcagatcgtctttgaaattccatcagaaactcattaa

SEQ ID NO: 4826 - DNA, 381 bp, Artificial Sequence
  Optimized genes for Saccharomyces cerevisiae
atgtcttggcaagcttacaccgacaacttaattggcactggtaaggtcgacaaggctgttatttactctagagccggtgatgccgtctgggcaacctccggtggtttgtccttgcaacctaacgaaattggtgagattgtccaaggttttgataacccagctggtttgcaatctaatggattgcacatccaaggtcaaaagttcatgctattgagagctgacgatcgttcaatttatggtagacatgacgctgaaggtgtggtctgtgttagaactaaacagaccgtaatcattgctcactacccaccaacagttcaagctggtgaagctactaagatcgttgaacaattagccgattacctgatcggggttcaatattaa

SEQ ID NO: 4827 - DNA, 2529 bp, Artificial Sequence
  Optimized genes for Saccharomyces cerevisiae
atggtggctttcaccgttgatcagatgagatctttgatggataaggttactaatgttagaaatatgtctgtaattgcccacgtcgatcacggtaaatctacattaactgattccttggtacaacgtgccggtatcatctccgcggctaaggctggtgaagctagattcactgacacccgcaaagatgaacaggaaagaggtatcaccattaagagtaccgcaatatccttatattcagaaatgtctgatgaggatgttaaggaaatcaagcaaaagaccgacggtaactcctttttgatcaacttgattgactcgccaggtcacgttgatttctcttctgaagtcaccgctgcattacgtgtcactgatggcgctctagtggttgtcgataccattgaaggtgtctgtgttcaaactgaaacagttttgaggcaagccttgggtgaaagaattaagccagtcgttgtcattaacaaagtcgatcgtgctttgttagagttgcaagtcagcaaagaagatttataccaaaccttcgccagaaccgttgaatccgtgaacgttatcgtttctacatacgcagacgaggttttaggtgatgtccaagtttatccagctaggggtaccgtcgcttttggttccggtttacacggctgggccttcactattagacaatttgctactagatacgctaaaaagttcggggttgacaaagcaaagatgatggatagattgtggggggactctttcttcaatccaaaaaccaagaagtggaccaacaaagacactgatgccgaaggtaagccattggaaagagccttcaatatgttcattcttgacccaattttccgtttgttcacggctattatgaactttaaaaaggatgaaattccagttctattggaaaagttagaaatcgttttgaagggtgatgagaaagacctggaaggcaaggctttgttgaaggtggttatgagaaagtttttaccagctgctgacgccttattggaaatgatcgtcctccatttgccttcgcctgtcactgcccaagcttatcgggccgaacaattgtacgaaggtcctgccgatgacgctaactgtatagccattaagaactgcgaccccaaggccgacctaatgctttatgtttccaagatggtcccaacctctgataaaggtcgtttttacgctttcggaagagttttcgccggtactgttaagtctggtcagaaggttagaatccaaggaccaaattacgttccaggtaagaaagacgatctatttattaaagctatccaacgtgtcgttttgatgatgggtagatttgttgaaccaatcgatgattgtccagctggtaacattattggtctagttggtatcgaccaatttttgttaaagaccggtactttgacaactagcgaaactgctcacaacatgaaggttatgaaattctccgtttctccagtagtccaagtcgcggtcgaagtcaaaaatgctaacgacctacctaaattggtagaaggtttgaagagacttagcaagtcagacccttgtgtcttgacgtacatgtctgaatctggtgaacatatcgtggccggtaccggtgaattgcatttagaaatctgtctccaagatttggagcacgaccacgctggtgttccattgaaaatctctcctcctgttgttgcttaccgtgaaacagttgaatctgaatccagtcagactgcactgtccaagtccccaaacaagcataacagaatctacttgaaggctgagccaattgacgaggaagtatctttggctatcgaaaacggtattattaacccaagagacgatttcaaggccagagctagaatcatggctgacgactatggttgggacgtcactgatgctagaaagatctggtgctttggtccagacggtaacggtccaaacctagtgatcgaccaaactaaggctgttcaatacttgcacgaaattaaggattctgttgtcgctgctttccaatgggccactaaggaaggtcctattttcggtgaagaaatgagatctgttagagttaacattttagacgtaaccttgcacgcagacgctattcataggggcggaggccaaatcattccaactatgagaagagctacttacgctggtttcttgctggctgatccaaagattcaagaaccagtttttcttgttgagattcaatgtccagaacaagccgtgggtggtatctactccgtcttgaataaaaagagaggccaagttgtttcagaggaacaaagaccaggtactccattgtttacagtgaaggcttatttgccagtcaatgaatctttcggtttcaccggtgaattgagacaagcaactggtggtcaagcctttccacaaatggtcttcgatcattggtctactttgggtagtgatccattagaccccacttcaaaggctggtgaaattgtcctggctgctagaaagagacatggtatgaaggaagaagtcccgggttggcaagaatactacgacaagttgtaa

SEQ ID NO: 4828 - DNA, 1110 bp, Artificial Sequence
  Optimized genes for Saccharomyces cerevisiae
atgttgagaaacacattcttccgtaacacttctagacgtttcttggccactgtcaagcaaccgtctattggtagatatactggcaagccaaacccatctactggtaagtacactgtttctttcatcgaaggtgatggtatcggtcctgaaattagtaagagcgttaagaaaattttttccgctgctaacgtaccaattgaatgggagtcatgtgatgtctctccaattttcgttaacggtttgacgaccatccccgacccagctgttcaatcaatcaccaagaaccttgtcgcattgaaaggtcctttggcgactcctattggtaaaggtcacagatctttaaatttgactttaagaaaaacctttggtttgttcgcaaatgtcagaccagctaagtccattgaaggttttaagactacctacgaaaatgtagatttagttcttataagagaaaatactgaaggagaatatagtggtattgaacatatcgtctgcccaggtgtcgtgcaatcgatcaagttgatcaccagagacgcttcagaaagagttattagatacgcctttgaatacgccagagcaatcggaagaccaagagtgatcgtcgttcacaagagcaccatccaacgtctggctgacggtttgttcgtcaacgttgccaaagaattgtccaaggaatatccagacttgacattggagactgaactcattgacaactctgttctaaaggttgtcactaacccttctgcttacaccgatgccgtctctgtgtgtccaaatttatacggtgacattttgtctgatctgaactccggtttgtccgctggctccttgggtctaactccatctgctaacattggtcacaagatttccatctttgaggctgttcatggttctgccccagacattgctggtcaagataaagctaatccaactgctttgttactatctagtgttatgatgttgaaccatatgggtttaacaaaccacgctgatcagatccaaaacgccgttttatccactattgcttctggcccagaaaacaggaccggtgatttggctggtaccgctaccacctcttccttcacagaagccgttatcaagagattgtaa

SEQ ID NO: 4829 - DNA, 192 bp, Artificial Sequence
  Optimized genes for Saccharomyces cerevisiae
atggctaaggttcacggttctttggctagagccggtaaggtcaaatctcaaactccaaaggttgaaaagaccgaaaaaccaaagaaacctaagggtagagcttacaagagattattgtatactagaagattcgttaacgtcacattggttaacggtaagagacgtatgaatccaggtccatccgtgcaataa

SEQ ID NO: 4830 - DNA, 1314 bp, Artificial Sequence
  Optimized genes for Saccharomyces cerevisiae
atgccaaagaaggtatggaagtctagcaccccctccacctacgaacacatttcctcgttgagacctaagttcgtttctagagttgacaatgtgttgcatcaaagaaagtctctaacttttagcaacgtcgttgtcccagacaagaagaacaacaccctcacatctagcgtcatttactcacaaggttcagacatctacgaaatcgacttcgcagttccgttgcaagaagctgcttccgaacctgttaaagactacggggatgcttttgaaggtatcgaaaacacttccttgtctccaaagtttgtttatcaaggtgaaacggtttctaaaatggcttatctagataagactggtgaaaccaccttactgtcgatgtctaagaacggttccttggcttggttcaaggagggcatcaaagtccctatccacatcgtccaggaattgatgggtccagctacctcttacgcttccattcattccttgactagaccaggtgatcttccagaaaaagacttctcactggccatttctgacttcggaatctccaacgatactgagactatagtcaagtcacaatctaacggtgatgaagaagattctattttgaagattattgacaacgcgggtaagccaggtgaaattttgagaactgtacatgttccaggtactaccgttacacacaccgttagattctttgataaccacatcttcgcttcatgttctgatgataacatcttgcgtttctgggacactaggacctctgacaagccaatctgggttttgggtgaaccaaagaatggtaaattgacatcttttgactgttcccaagtgtctaacaatttattcgtcaccggcttctctactggtattattaaattatgggatgcccgtgcagctgaggccgctaccactgatttgacttaccgtcaaaacggtgaagacccaattcaaaacgaaatcgctaacttttaccatgctggtggtgacagtgtcgttgatgtgcaattctccgccacatcttctagtgaatttttcaccgtcggtggcactggtaacatctaccactggaataccgactactccttatccaagtataatcctgatgatactattgccccaccacaggacgccacagaagaatctcaaactaaatccttaagattcctacataagggtggatccagaagatctccaaagcaaattggtagaagaaatacggctgcttggcaccctgttattgaaaatttggttggtactgtcgatgatgacagtttggttagtatttacaaaccatatactgaggaatctgaataa

SEQ ID NO: 4831 - DNA, 324 bp, Artificial Sequence
  Optimized genes for Saccharomyces cerevisiae
atggccgaatcacatagactatacgttaagggcaaacacttgagttaccaaagatctaagagagttaataacccaaacgtctccttaattaaaattgaaggtgttgctaccccacaagaggcccaattttatttgggtaagagaatcgcttatgtctacagagcatctaaggaagtgaggggttctaaaattagagttatgtggggtaaggttactcgtacccacggtaactctggtgtcgtcagagctacattccgtaataacttgccagctaagactttcggtgctagcgtaagaatcttcttgtacccttccaacatctaa

SEQ ID NO: 4832 - DNA, 633 bp, Artificial Sequence
  Optimized genes for Saccharomyces cerevisiae
atgcttcaatccgtggttttctttgctttactgacatttgcttcatctgtttccgctatttattctaacaacactgtctctaccacaacaactttggctccatcttacagcttggttccacaagaaactaccatctcttatgccgatgacactactaccttcttcgtcacttcgaccgtctactccacctcctggttcacctctactagtgcaaccattactaatgccgcttcttcctctttgtccacttcttctgcctctggttctgtcaccccagagtcaacacatgaaattacttctacctccactatcacttcaactttgttgctaacgttacacgactcgactaccttgtccccatcctccacagctgcttctgttagcgatgaagattctaacaataaggacgctaaggttaaaagttttgaacaagcttccacttcaaacggttgtgtccctatcactaagttcgttaccgtcactaatgaacctgttacgcagtacgtaaccgtcaccccaaacaccactacccaatacgttactgtgacaggtgccccaagcgttactactactagtcccggtaacgttcaatggtacaacaccacctctattactaactctacttcttggtaa

SEQ ID NO: 4833 - DNA, 2523 bp, Artificial Sequence
  Optimized genes for Saccharomyces cerevisiae
atggccgaaaaggaagaggccatattcagatctgctgaaatggcattagtacagttttacattccacaggagatctctagagactcggcatatactcttggccaattgggtttggtgcaattcagagatttgaactctaaagttagagcctttcaaagaactttcgttaacgaaattcgtagactggacaacgtcgaaagacaatacaggtacttctacagcttgttaaagaaacacgatattaagttatacgaaggcgacactgacaagtatttggatggttccggtgagttgtacgttccaccatctggatcagttattgatgattacgttagaaacgcctcttatcttgaggaacgtttgattcaaatggaggacgccaccgatcaaattgaagttcaaaagaacgatttggagcagtatagattcattttgcaatctggtgatgaattctttttaaagggtgacaatactgactcgaccagttacatggatgaagacatgatcgatgccaacggtgaaaatatagccgcagctattggtgcttccgtcaattatgtgacgggtgttatcgcacgtgataaggttgctactttggaacaaattttgtggcgtgttttgcgtggtaacttatttttcaaaaccgtcgaaattgaacaaccagtttacgacgttaagaccagagaatacaagcataagaatgcgtttatcgttttctctcatggggacttgatcatcaagagaattagaaaaatcgctgaatctttagacgctaacctatacgatgtcgactcttctaacgaaggtagatcccaacaactggctaaggtcaacaaaaacttgtccgatttgtatactgttttaaaaaccacaagtactaccttggaatctgaattgtatgccatcgccaaagaactagattcctggttccaagacgttacgagagaaaaagccatcttcgaaatcttgaacaagtcaaactatgatacaaacagaaagattttgattgccgaaggttggattccacgcgatgaattggctaccttgcaagccagattgggtgaaatgatcgcaagactgggtatcgatgttccatcaatcatccaagtcttggacacaaaccataccccaccgacttttcacagaactaataagtttaccgctggtttccaatctatatgtgactgttacggaatcgctcaatacagagaaattaacgctggtttgccaacaatcgtcacattcccattcatgtttgctattatgttcggtgacatgggtcatggcttcttaatgactttggctgctttgtcgcttgttttgaacgaaaaaaagattaacaaaatgaagaggggtgagattttcgacatggcgtttactggtagatacatcattttgttaatgggtgtgttctccatgtacactggtttcctatacaatgatatcttttctaaaactatgactatcttcaagagcggctggaagtggcctgatcactggaagaagggcgaatccatcactgctacttctgtcggtacctacccaattggtttggactgggcttggcatggtactgagaatgctttattgttctctaactcatacaagatgaagctgagcattctcatgggtttcattcacatgacttatagttatttcttcagtttggctaaccacttatatttcaactctatgattgatattatcggtaattttattccaggtttacttttcatgcaaggtatctttggttacttgtctgtttgtattgtctacaagtgggctgtcgattgggtaaaggatggtaagccagcccctggtttgttgaatatgctaattaacatgttcttgtctcctggtaccattgacgacgaactatacccacatcaagccaaggtccaagttttcttgttgttgatggctttagtatgcatcccatggctattgttggtcaaaccactacactttaaattcacccataagaagaagtctcatgaacctctgccctctaccgaagctgacgcttcttctgaagatctagaagctcaacaattgatctcagctatggacgctgatgatgccgaagaagaagaagttggatccggttcccacggtgaagacttcggtgacatcatgattcaccaagttattcacactatcgaattctgtttgaattgcgtctcccataccgcttcatacttaagattgtgggctttgtccttagctcacgcccaattatcctccgtcttgtggactatgaccattcagatcgcttttggttttcgtggttttgtcggggttttcatgactgtcgctctttttgctatgtggttcgctttaacatgtgcagttttggttttgatggaaggtaccagcgccatgctccactctttgagactacactgggtggagtccatgtccaagttcttcgttggtgaaggtttgccttacgaaccatttgcttttgaatacaaggacatggaagttgctgtcgcttctgcttcttccagtgcttcctcttaa

SEQ ID NO: 4834 - DNA, 420 bp, Artificial Sequence
  Optimized genes for Saccharomyces cerevisiae
atgtggaaggccgttatgaacgcatggaatggtaccgaatcacagtccaaaaacgtatccaacattcaatcctattcatttgaagacatgaaaagaatcgtcggaaagcacgacccaaacgttgttttagtcgatgttagagaaccaagcgaatactcgattgttcacattccagcttccatcaacgtgccataccgttctcatcccgatgctttcgctttggaccctttggaattcgaaaagcaaatcggtattcctaagccagattctgctaaggagttgattttctactgtgcctctggcaagagaggtggtgaagctcaaaaagtcgcttcttctcacggttattctaatacttccctatacccaggttctatgaacgattgggtcagtcatggtggtgataagttggacttgtaa

SEQ ID NO: 4835 - DNA, 318 bp, Artificial Sequence
  Optimized genes for Saccharomyces cerevisiae
atgctaatgccaaaggaagatagaaacaaaatccaccaatacttgttccaagaaggtgttgtcgttgccaagaaagatttcaaccaggctaaacacgaagaaattgacaccaagaacttgtacgttattaaggctctgcaatctttgacctctaagggttatgtgaagacacaattttcctggcaatattactactacactttaactgaagaaggtgtcgaataccttagagagtatttgaatttaccagagcatattgttcctggtacttacatccaagaaagaaacccaacccaaagaccacaacgtagatactaa

SEQ ID NO: 4836 - DNA, 1236 bp, Artificial Sequence
  Optimized genes for Saccharomyces cerevisiae
atgtcatctgcggccacgaaggctaccttctgcatccagaacggtccaagcttcgagggtatctccttcggtgccaataagtctgtcgctggtgaaactgttttcaccacctctttggttggttacccagaatctatgactgatccatcctacagaggtcaaattttagtctttacacaacctttaattggtaattacggtgtgccatcaggtgaggcaagagatgaatataacctattgaagtactttgaatctcctcacattcacgttgtaggaatcgttgtcgctgaatacgcttatcagtactctcattggactgctgtcgaatcattggctcaatggtgtcaacgtgaaggtgttgctgccattaccggtgttgacacaagggaattagttcaatatttgagagaacaaggttcttctttgggtcgtatcaccctggccgaccatgacccagttccttacgtaaacccaatgaagactaacttggtcgctcaagttaccactaagaaaccatttcatgtctccgctttgccaggtaaggccaaggcaaacgttgctctgatcgattgcggtgtcaaagaaaacattatcagatgtttggtcaagagaggcgcaaacgtgactgttttcccatacgactatagaatccaagatgttgcttccgaattcgatggcatctttttgagtaatggtccaggaaatccagaattgtgtcaagccacaatctccaatgtcagagaattgcttaacaacccagtgtacgattgtataccgattttcggtatctgtttgggccaccaattgttggctttagcttctggtgcttctactcacaagctaaagtatggtaatagagctcacaacattccagctatggacttgactactggtcaatgtcacattacttcccaaaaccacgggtacgccgtcgatcctgaaaccttaccaaaagatcaatggaaaccatacttcgtcaacttaaacgacaagtctaatgaaggtatgattcatttgcaaagacccattttctcgacccaattccatcctgaggctaaaggtggtccactcgacactgctattttatttgataaatttttcgacaacattgaaaagtatcaacttcaatctcaggctaagtctagtatctccctaaaggttacttacagcaccgacaagtctcgtttgcaatccattaacgttactaagttggccaaagaaagagttttgttctaa

SEQ ID NO: 4837 - DNA, 702 bp, Artificial Sequence
  Optimized genes for Saccharomyces cerevisiae
atgtcatctgcaattaccgctttaactccaaaccaagttaacgatgaattgaacaagatgcaagcttttatcagaaaggaagctgaagagaaagccaaggaaattcagttgaaggctgaccaagagtatgaaatagaaaagaccaatatcgtgagaaacgaaactaacaacatcgacggtaacttcaagtctaagttaaagaaggccatgttgtctcaacaaattactaaatctactatcgctaataagatgcgtttgaaagtcctaagtgccagagaacaatccttagacggtattttcgaagagactaaggagaagttgtccggtattgccaacaatagggacgaatataaaccaattttgcaatcattaatcgtcgaggctttgctaaaattgcttgaaccaaaggcaattgtcaaggctcttgaaagagatgttgacttgattgaatctatgaaggatgatatcatgagagaatacggtgaaaaggctcaaagagctccattggaagaaattgtaatctccaacgactacttgaataaagatctggttagcggtggcgttgttgtctccaatgcgtccgataagatcgaaattaacaacacactcgaagaaagattgaaactattgtctgaagaagccctgccagctatccgtttagaattgtacggtccttctaagaccagaaagttctttgattaa

SEQ ID NO: 4838 - DNA, 432 bp, Artificial Sequence
  Optimized genes for Saccharomyces cerevisiae
atgtccgatgttgaagaagtggtcgaagttcaagaagaaacagttgtcgaacaaactgctgaagttaccattgaggatgctttgaaggtcgttttaagaaccgctttggtccatgatggtctagccagaggtttgcgtgaatctaccaaggctttgactagaggagaagctctattagttgtcttggtttcaagtgttactgaagctaacattatcaagttggtagaaggtttagctaatgacccagaaaacaaggtcccactgatcaaggtggccgacgccaaacagttgggcgagtgggcaggtcttggtaagatcgatagagaaggtaacgctagaaaagtagtcggtgcctctgttgttgttgtcaaaaactggggtgctgagactgacgaattgtctatgattatggaacacttctcccaacaataa

SEQ ID NO: 4839 - DNA, 1365 bp, Artificial Sequence
  Optimized genes for Saccharomyces cerevisiae
atgtccgagccagagtttcaacaagcttacgaagaagtcgtcagttccttggaagactccaccttgttcgaacaacatccagaatacagaaaagttctaccaatcgtttctgtcccagaaaggatcattcaattcagagtcacttgggaaaatgacaagggtgaacaagaagttgctcaaggttatagagtccaatataacagcgctaagggtccatataaaggtggtcttagattccatccatctgttaacttgtctatcttgaagtttttgggatttgaacaaatctttaagaacagtctgaccggtttagacatgggtggtggtaaaggtggcttgtgtgttgatttgaaaggtcgttctaacaacgaaatcagaagaatttgttacgctttcatgagagaactctctcgtcacataggtcaggacactgatgtaccagctggcgatattggtgtcggtggtcgtgagattggatacttgttcggtgcatatagatcttacaaaaactcatgggagggtgtgttaactggtaaaggtttgaactggggtggttccttgattagacctgaagccactggttacggtttggtttactacacccaagctatgatcgactacgctactaacggtaaggaatctttcgaaggtaagagagtgacgatttctggttctgggaatgtagctcaatacgcagcattaaaggtcatcgaactgggtggcactgttgtttctttatctgattcaaagggttgtattatttcagagactggtattacctctgaacaagttgccgacatcagttctgctaaggttaacttcaagtcattggaacaaatcgttaatgaatactccacattcagcgaaaacaaggttcagtatattgccggtgccagaccatggacacacgtccaaaaggttgacattgctcttccctgcgccacccaaaacgaagtctccggagaagaagctaaggctttagtagcccaaggtgtcaagttcattgctgaaggttccaatatgggctccactccagaggctatcgctgttttcgaaactgctagatccaccgccacaggtccttcggaagccgtttggtacggtcctccaaaggccgcgaacttaggtggggtcgctgtttccggtctagaaatggctcagaactctcaaagaattacttggacctctgaacgtgtcgaccaagaactaaaaagaattatgatcaattgttttaatgaatgtatcgattatgctaagaagtacaccaaggatggtaaggttttgccatccttggttaagggcgctaacattgcatcttttatcaaagtgtcggatgccatgttcgatcaaggtgatgtcttctaa

SEQ ID NO: 4840 - DNA, 1197 bp, Artificial Sequence
  Optimized genes for Saccharomyces cerevisiae
atgtctcaaaacgtctacatcgtttctaccgccagaactccaatcggttccttccaaggttccctatcttccaagaccgctgttgaattgggtgccgttgctttaaaaggtgcgttagctaaggtcccagaactggatgcttctaaagacttcgatgaaattattttcggtaatgttttgtccgccaacttgggtcaagccccagcaagacaagttgccctggctgcaggattgtccaaccacatcgtcgcttccactgttaacaaggtctgtgctagtgctatgaaggccattattcttggtgcccaatctattaagtgtggtaatgctgacgtagtggttgcgggtggctgtgaatccatgacgaacgctccatattacatgcctgccgcccgtgctggtgcaaaatttggtcaaactgtcttggtcgacggcgtcgaaagggatggtctaaacgacgcttatgacggtctagccatgggtgttcatgctgaaaagtgtgccagagattgggatataacaagagaacaacaagataactttgccattgagagctaccaaaagtctcaaaaatcccagaaggaaggtaaatttgataacgaaatcgttcctgtcaccatcaaaggctttagaggtaagccagacacccaggtaaccaaggatgaagaaccagctagattgcacgtggaaaagctcagatctgccagaactgttttccaaaaggaaaatggtactgttactgcagctaacgcttcgccaatcaatgatggtgctgctgctgtcattttggtttcagaaaaggtattaaaagaaaagaacttgaagccattggctatcattaagggttggggcgaggctgctcaccaaccagctgacttcacctgggctcccagtttggctgttcctaaagctttgaaacatgcaggtattgaagatatcaatagcgttgactacttcgagttcaacgaagctttctctgttgtgggtttagtcaatactaagattttgaagttggacccatctaaggttaacgtttacggtggagcagtggctttagggcatccattaggttgctctggtgctcgtgttgttgtcacattgttgtcaatcttgcaacaagagggtggtaagattggtgtcgctgccatctgtaacggtggtggtggtgcttcttctattgtcattgaaaagatctaa

SEQ ID NO: 4841 - DNA, 474 bp, Artificial Sequence
  Optimized genes for Saccharomyces cerevisiae
atgccaatcgaccaagagaagctggccaaattgcagaagttatctgccaacaacaaggttggtggtactagaagaaaattaaacaagaaggctggttcatctgctggtgccaacaaggacgataccaaattgcaatcccaactagctaaacttcacgctgttactatcgataacgtggctgaagccaacttcttcaaggatgacggaaaggttatgcattttaataaggtcggtgtccaagtagcagctcaacacaatacatccgtcttctacggcttgccacaggaaaagaatttgcaagatttgtttccaggtatcatttctcaattgggtcctgaagctattcaagctttaagtcaattggcagctcaaatggaaaagcatgaagcgaaggccccagccgacgctgaaaagaaagatgaagctattccagaattggttgagggtcaaaccttcgatgctgacgttgaataa

SEQ ID NO: 4842 - DNA, 483 bp, Artificial Sequence
  Optimized genes for Saccharomyces cerevisiae
atgggtaaatctcatggttatagatccagaaccagatacatgttccaaagagatttcagaaaacatggcgctgttcacatgtctacttatttgaagatttacaaagtcggtgatatcgttgacatcaaggctaatggttcaattcaaaagggtatgccacacaagttttaccaaggaaagacaggtgtcgtttacaacgtgactaaaagttccgtcggtgtcattattaacaagatggttggtaaccgttatttggaaaagagattgaacttgagagttgagcacattaaacattctaagtgtagacaagaatttctagaacgtgttaaggctaatgctgccaagagagcagaagccaaggctcaaggtgtagccgttcaattgaagcgtcagccagctcaaccaagggaatccagaatcgttagcactgaaggtaacgttcctcaaaccttagctccagtcccatacgaaaccttcatctaa

SEQ ID NO: 4843 - DNA, 711 bp, Artificial Sequence
  Optimized genes for Saccharomyces cerevisiae
atgaagttgaatatttcctatccagtcaacggttcccaaaagaccttcgaaattgatgatgaacatagaataagagtttttttcgacaagagaattggtcaagaagtagacggtgaagctgttggtgacgaattcaagggctacgttttcaagatctctggtggtaacgacaagcaagggtttcctatgaagcagggagtcttgttgccaactagaattaaattgctgttaaccaaaaacgtctcttgttacagacctagacgtgacggtgaaagaaagagaaagtctgttagaggtgctatcgtgggtccagacctagctgtcttggccttggttattgttaagaagggcgagcaagaactagagggtttgacagataccactgttccaaagagattaggtccaaagagagcaaacaacattagaaaattcttcggtttgtctaaggaagatgatgtcagagattttgttatccgtagagaagtcactaaaggtgaaaagacttacactaaggctcccaagatccagaggttggtgaccccacaacgtttacaacgtaagaggcaccaaagagctttgaaagttcgtaatgcccaagctcaaagagaagctgccgcagaatatgctcaattacttgccaagagattgtcagaaagaaaagccgaaaaagcggagatcagaaaaagacgcgcttccagcttgaaggcttaa

SEQ ID NO: 4844 - DNA, 894 bp, Artificial Sequence
  Optimized genes for Saccharomyces cerevisiae
atggcttttcaaaaggatgccaagtcgtccgcttattcttcaagattccaaactccatttagaagaagaagagaaggtaaaaccgactattaccaaagaaagagattagttacacagcacaaggctaagtacaacacccctaagtacagattggtcgtgagattcactaacaaggatattatttgtcaaataatttcctccactatcactggtgacgtcgttttggcagccgcttactctcatgaattgccaagatacggtatcacccatggtttgaccaattgggccgcagcttacgccactggtttgttgatcgccagaaggaccttgcaaaaattgggcctagacgaaacttacaaaggcgtagaagaggtcgaaggtgaatacgaactcacagaagctgttgaggacggtccaagaccattcaaggtcttcttggacattggtctgcagcgtaccactactggtgctcgtgtttttggagctttgaagggtgccagcgatgggggtttatacgttcctcattctgaaaacagattcccaggttgggatttcgaaaccgaagaaattgacccagaattgctacgttcttacatttttggtggtcacgtttcacaatacatggaagaattagctgatgacgatgaagaaagattctccgaacttttcaaaggttatttggccgacgatatcgatgctgattctttggaagacatctatactagtgcgcacgaggctatcagagctgatcccgccttcaagccaacggaaaagaagtttacaaaggaacaatacgcagctgaatctaaaaaatatagacaaactaagttatctaaggaagagcgtgctgctagagttgccgctaagattgctgctttagctggtcaacaataa

SEQ ID NO: 4845 - DNA, 324 bp, Artificial Sequence
  Optimized genes for Saccharomyces cerevisiae
atggccgaaagccacaggctatacgttaagggcaaacatttgagttatcaaagatcaaagagagttaacaatcctaacgtttctttaattaagatcgaaggtgtcgctaccccacaagatgcccaattctacttgggtaagagaattgcttatgtataccgtgcttctaaagaagtgcgtggttctaagatcagagttatgtggggtaaagtcaccagaactcacggtaactctggtgttgtcagagcaacttttagaaacaatttgccagctaagacattcggtgcttccgtcagaattttcttgtacccatccaacatctaa

SEQ ID NO: 4846 - DNA, 1218 bp, Artificial Sequence
  Optimized genes for Saccharomyces cerevisiae
atgttttctttgaaggctttgttgccacttgccttgttattggtcagcgcaaaccaagtcgccgctaaggtgcataaggctaaaatctacaaacacgagttatctgacgaaatgaaggaagttactttcgaacaacatttggcccatttgggtcagaaatatctgacccaattcgaaaaggccaatccagaagttgtcttttccagagaacaccctttctttactgagggtggccacgacgttccattgacgaactatttgaacgctcaatactacacagatattaccctgggtacacctccacaaaactttaaggtaatcttggacaccggttcttccaacttatgggtcccaagcaacgaatgtggatccttggcctgcttcttacactcaaagtacgaccacgaagcttcttcttcctacaaagctaacggtaccgaattcgctatccaatatggtactggttcattggaaggctacatttcacaagatacattatctataggtgatttaactattccaaagcaagattttgctgaagctacaagtgaaccggggctaactttcgctttcggcaagtttgatggtattttgggcttgggttacgataccatttctgtcgacaaggtggtcccaccattctacaatgccattcaacaagatttgcttgacgaaaagagatttgctttctacctaggtgatacctctaaagacactgaaaatggtggtgaagctactttcggtggtattgatgagtctaagttcaagggtgacattacctggctcccagttagaagaaaagcttactgggaagttaagttcgaaggtattggtttgggtgatgaatatgctgaattggaatctcatggtgcagctatcgacactggtacctccttgattactttaccatctggtttggctgaaatgatcaacgctgaaatcggtgccaagaaaggttggactggacagtacactcttgattgtaacactagagacaacctaccagacttaattttcaattttaacggttacaatttcactatcggtccctatgattataccttggaagtttcgggtagttgtatctccgcaattacccctatggattttcctgagccagttggtccactagccatcgttggtgacgcgttcttgcgtaagtactactccatttatgacttgggtaacaacgctgttggtttggctaaggccatctaa

SEQ ID NO: 4847 - DNA, 654 bp, Artificial Sequence
  Optimized genes for Saccharomyces cerevisiae
atgtctaaaatcacaagttcacaagttagagaacacgtgaaagaattgttaaagtacagtaacgaaaccaagaagagaaatttccttgaaactgttgagttgcaagttggtttgaagaactacgacccacaaagagacaaaagattttcaggtagcttaaagctgcctaattgtccacgtcctaacatgtctatttgcatttttggagatgctttcgacgttgaccgtgctaagtcttgtggtgtggacgctatgtctgttgatgacctaaagaaattgaacaaaaataaaaagttgattaagaagctctctaagaagtacaacgctttcattgcttccgaagtcttgatcaagcaagtacccaggttattgggtccacaattgtccaaggcaggcaagttcccaactccagtttcccataatgatgatttgtatggtaaggttaccgatgtaagatccactatcaaattccaactaaaaaaggtcttgtgtttggctgtcgccgtcggtaacgttgaaatggaagaagatgttctagttaaccagattttgatgtctgtcaacttttttgtctctttgttgaagaagaactggcaaaacgtcggttcccttgtcgttaagtcttcgatgggtccagccttcagattatattaa

SEQ ID NO: 4848 - DNA, 1113 bp, Artificial Sequence
  Optimized genes for Saccharomyces cerevisiae
atggctgaagcctccattgaaaagactcaaatattgcaaaagtacttagaattggatcaaagaggtaggattattgctgaatacgtgtggatcgacggtacaggtaatctgagatctaaaggtcgtaccttaaagaagagaattacttcaattgatcaattgcctgaatggaacttcgatggttcctccaccaaccaagctccaggtcacgactcggatatctacctaaagccagttgcctattacccagatccattcagaagaggtgacaacatcgtcgtcttggcagcttgttacaacaacgacggtacgccaaataaatttaatcacagacacgaagcagccaagttgttcgctgcacacaaggatgaggaaatttggttcggtttggaacaggaatatactttgttcgacatgtatgatgatgtttatggttggccaaagggtggttaccctgctccgcaaggtccttattattgtggtgttggcgcgggaaaagtctacgctagagatatgatcgaggctcattaccgtgcttgtttgtacgccggcttagagattagtggtattaacgccgaagttatgccatcccaatgggaatttcaagttggtccatgcaccggtattgacatgggtgaccaattgtggatggccagatactttctacatagagttgctgaagaattcggtatcaaaatctctttccaccccaaaccattaaagggtgattggaacggggctggatgtcatactaatgtctctaccaaggaaatgcgtcagccaggtggtatgaaatatatcgaacaagccattgaaaagttgtctaagagacacgctgaacatatcaagttgtacggttctgacaacgacatgagattgactggtagacatgaaaccgcttcaatgactgctttttcttccggcgttgctaacagaggttctagtattagaattccaagatctgtcgccaaggaaggttacggttactttgaagatcgtagaccagcttctaatatcgatccttaccttgttactggtattatgtgcgaaaccgtatgtggtgctatcgacaacgctgacatgactaaggagttcgaaagagaaagctcctaa

SEQ ID NO: 4849 - DNA, 279 bp, Artificial Sequence
  Optimized genes for Saccharomyces cerevisiae
atggccaagcgtaccaaaaaagtcggtattactggtaagtacggtgtacgttacggatcctcattgagaaggcaagttaagaagttggaaatccaacaacacgctagatacgattgttctttctgtggtaagaaaactgtcaagagaggcgctgcaggtatttggacttgctcctgttgtaagaagactgttgctggtggtgcctatacagtttctaccgccgctgctgctaccgttagatctactatcagaagattaagagaaatggtggaagcttaa

SEQ ID NO: 4850 - DNA, 1377 bp, Artificial Sequence
  Optimized genes for Saccharomyces cerevisiae
atgggtaaggaaaagtcccacatcaacgttgttgtcatcggtcatgtagactcgggtaagagtactactactggtcacttgatttataaatgtggtggcattgataaacgtaccattgaaaaattcgaaaaggaagcagccgagttgggtaagggcagttttaagtacgcctgggtcctggataagttgaaagctgaaagagaaagaggtatcactattgacatcgcattgtggaaattcgaaactcctaagtaccaagtcaccgttatcgatgctccaggtcaccgtgacttcattaagaacatgattactggtacctctcaagccgattgtgccatccttatcattgcaggtggtgtcggtgaattcgaagccggtatttctaaggacggtcaaacgagagaacacgctttgttggcttttactctcggtgtgagacaattgatcgtcgctgttaataaaatggattccgttaagtgggacgagtctagatttcaagaaatcgtcaaggaaacctctaacttcattaaaaaggttggttacaacccaaagaccgtgccattcgttccaatctccggttggaacggtgacaatatgattgaagctaccacaaatgctccatggtataagggttgggaaaaggagacaaaagcaggtgtcgtcaagggtaagactttgttggaagctattgacgctattgaacaaccttctagacctactgataaaccattaagattgccattacaagatgtctacaaaattggtggtataggtaccgttcctgtcggtagagttgaaactggcgttattaagccaggtatggtcgtcacttttgctccagctggggttactactgaagttaaatccgttgaaatgcaccatgagcagttagaacaaggtgtgccaggtgacaatgttggattcaacgtcaagaacgtgtctgttaaggaaatcagaagaggtaacgtctgcggtgatgccaagaacgatcccccaaagggctgtgcttcatttaacgccacagttatcgttttaaaccatccaggacaaatttctgctgggtattctccagttttggactgtcataccgcccatatcgcgtgtagatttgatgaattgttagaaaagaatgacagacgttccggtaaaaagctagaagaccacccaaagttcctaaaatctggtgacgccgctttggtcaagttcgttccatccaaaccgatgtgcgtagaagctttcagcgaataccctccattgggtaggttcgctgttagagatatgagacaaacagttgctgttggtgtcattaagtcagtagataagaccgagaaggctgctaaggttaccaaggctgctcagaaggctgccaagaagtaa

SEQ ID NO: 4851 - DNA, 525 bp, Artificial Sequence
  Optimized genes for Saccharomyces cerevisiae
atgtccgctaaggcccaaaacccaatgcgtgatttgaagattgaaaagttggttctgaacattagtgtcggagagtcaggcgacagattgaccagagcctctaaggtcttagaacaacttagcggtcagacccctgttcaatccaaggcaagatacactgtaagaactttcggtatccgtagaaatgaaaaaatcgctgttcatgttactgtcagaggtccaaaggctgaagagatcttagaaagaggtttgaaggttaaagaataccaattgcgtgataggaacttttctgctaccggtaattttggtttcggtatcgacgaacacattgacttgggtattaagtatgatccatctattgggattttcggtatggacttctatgtcgttatgaacagaccaggtgctagagtcactagaagaaaaagatgtaagggtactgtgggtaactctcacaaaactaccaaggaagatacagtttcctggtttaaacaaaagtacgacgctgatgttctagataagtaa

SEQ ID NO: 4852 - DNA, 864 bp, Artificial Sequence
  Optimized genes for Saccharomyces cerevisiae
atgcaagcgattgctgattctttttccgttccaaatcgtctagttaaggagttgcaatatgataatgaacaaaatttggaatccgacttcgttaccggtgcctcccaatttcagagactcgctccatctttgacagtccctccaatcgcatctccacaacaatttttgagagcccacaccgacgatagtcgtaaccctgactgtaagatcaagatcgctcatggtactactacgttggctttcagattccaaggtggtatcattgtggcagttgatagcagagctactgctggtaactgggttgcaagtcaaaccgtcaagaaagttatcgaaattaatccattcttgctgggaactatggctggtggtgccgctgactgtcaattctgggaaacctggttgggatcacaatgtagacttcacgagttaagagaaaaagaaagaatttccgtcgctgctgcctccaagattttgtctaacttggtgtatcagtacaagggtgccggtttatccatgggtactatgatatgcggttacaccagaaaagaaggtccaactatttactatgtcgactcagatggtactagattgaagggtgacatcttctgtgttggttctggtcaaacattcgcctacggcgtcttagattcgaactacaagtgggatttatctgttgaagacgctttgtacttagggaagagatctattctagctgctgcccacagggatgcttactctggcggttctgtcaacttgtatcatgttaccgaagacggttggatctaccatggtaaccacgatgttggcgaattgttctggaaggtcaaagaagaagaaggttcttttaacaacgtaattggttaa

SEQ ID NO: 4853 - DNA, 438 bp, Artificial Sequence
  Optimized genes for Saccharomyces cerevisiae
atgggtaaaggtaagcctagaggtttgaattctgctagaaaattgagagttcaccgtagaaataacagatgggctgaaaacaattacaagaagaggttgttaggtactgctttcaaatcaagcccattcggtggttcttctcatgctaagggcattgttttggaaaaattgggtattgaaagtaagcaaccaaactccgcaatcagaaaatgtgtcagagtacaacttattaagaacggcaagaaggttaccgctttcgtgccaaacgatggttgtttaaactttgttgatgaaaacgacgaagttttgctagccggtttcggtagaaagggtaaggccaagggtgacatcccaggagtccgttttaaggttgtcaaggtctccggggtttccttgttagctctgtggaaagagaagaaggaaaagccaagatcttaa

SEQ ID NO: 4854 - DNA, 522 bp, Artificial Sequence
  Optimized genes for Saccharomyces cerevisiae
atgttggctttagctgacaacatcttgagaattattaactttttgttcttggttatttccatcggtctgataagttctttgttgaacacccaacacagacacagctctagagtaaattattgtatgttcgcctgtgcttacggtatcttcactgactctttgtacggtgttttcgccaattttattgaaccactagcatggcctttagttttgtttactcttgattttctaaacttcgttttcaccttcaccgctggtactgttttagctgttggtatcagagctcattcctgcaacaactcttcatacgtcgattccaacaagatcactcaaggttccggtactcgttgtaggcaagctcaggccgcagtcgccttcttatatttctcatgtgctatttttttggcgaagaccttgatgtccgtcttcaacatgatttcgaatggtgcttttggttctggatctttctctaaaagacgtagaactggccaagtgggtgtcccaacaatttctcaagtttaa

SEQ ID NO: 4855 - DNA, 630 bp, Artificial Sequence
  Optimized genes for Saccharomyces cerevisiae
atgtctcaacaagtcggaaactccatcagaagaaagctagttattgtgggtgatggtgcttgcggtaagacttgtttgttgattgtcttctcaaagggtcaatttcctgaagtttatgttccaactgtcttcgaaaattatgtagcagacgttgaagtcgatggtcgtagagttgagttggccctttgggatacagctggtcaagaggattacgacagactaagaccactgagttacccagattccaatgttgtcttgatttgtttctctatcgatttaccagactctttggaaaacgtccaggaaaagtggattgctgaagttttgcacttttgtcaaggggtcccaattatcttggtgggttgtaaggtcgacttaaggaacgaccctcaaactatcgaacaattgagacaagaaggtcagcaaccagttacctcgcaagaaggtcaatccgttgctgaccaaattggtgctactggttactacgaatgcagcgccaaaactggctacggtgttcgtgaagtattcgaagctgctaccagagcctctttgatgggcaagtctaagactaacggtaaagctaaaaaaaacaccaccgaaaagaagaaaaagaagtgtgttttgttataa

SEQ ID NO: 4856 - DNA, 3099 bp, Artificial Sequence
  Optimized genes for Saccharomyces cerevisiae
atggctgacacaccatctgttgctgttcaggctccaccaggttacggtaagactgaattgttccacttaccattgattgcacttgcttccaaaggtgacgtcaaatatgtttcctttttgttcgttccatacactgttttattggccaactgtatgattagactaggcagatgtggttgtctcaatgttgctccagtccgtaacttcatcgaagagggttgtgatggagttaccgatctgtacgttggtatttacgatgatttggccagtaccaacttcaccgacagaatcgctgcctgggaaaacattgtcgaatgcactttcagaactaataacgttaaattgggttacttgatagttgatgaattccacaactttgaaactgaagtgtatagacaatcccaattcggtggtattactaatttggactttgacgctttcgaaaaagctatcttcttgtccggtactgctccagaagctgtggccgatgctgccttgcaaagaatcggccttaccggtttggctaagaaatcaatggatatcaatgaactgaagcgtagtgaggatttatcccgtggtttgtcctcgtacccaactagaatgttcaacttgattaaggaaaagtctgaagttccattgggtcatgttcataagatttggaaaaaagttgaatctcaaccagaagaagctttaaaattattgttagccttattcgaaattgaaccagaatccaaggcaattgttgttgctagcactactaacgaagtagaagagttggcttgttcctggaggaagtactttagagtcgtctggatccatggtaaattaggtgctgctgagaaggttagcagaaccaaggaatttgttactgatgggtccatgagagttttaatcggtactaaattggttactgaaggtatcgacattaaacaattgatgatggtcattatgttggacaacagattgaacattatcgaattgattcaaggtgttggtagattgagagatggtggtttgtgttacttgttgtcaagaaagaattcttgggccgccagaaacagaaagggagaactaccacctattaaggaaggttgtatcaccgaacaagtccgtgaattctacggtttggaatctaagaagggtaagaaaggtcagcacgtcggctgctgtggttcgcgtaccgatttatctgctgacaccgtcgaattgattgaaagaatggatagattggccgaaaagcaagccactgcctctatgtctatcgtcgccttgccatcatcttttcaagaatctaattcctctgaccgctgtagaaagtattgttcgtctgatgaagactctaacacttgtatccatggttctgcaaatgcaagtactaacgcaactactaactcatctactaacgcaactaccactgcttctactaatgtcagaacctctgctaccactactgcttctatcaacgttagaacctctgccacaaccaccgaatccactaactcctctacaaacgctactaccacagcttctaccaatgtcagaacatccgctacaacgacggcttctattaatgtaagaacctctgccactacaaccgaatccaccaattctaacacttctgctaccaccaccgaatctactgactctaatacctctgctaccactactgaatctactaactcatccacaaacgctactactacggcctccattaacgtcagaacctccgctaccacgaccgaatccacaaatagcaatactaacgctaccacaactgaaagcactaactcttccactaacgcgaccactacagaaggtaccaactcaaacacctctgctaccaccactgcttctactaactcctcaactaatgcgaccactaccgaaagtactaacgctagtgctaaagaggatgctaacaaggatggcaatgcagaagacaaccgtttccaccctgttactgatattaacaaggaatcttacaagagaaagggttcgcaaatggtcttgttggaaagaaagaagctaaaggcccaatttcccaacaccagtgaaaacatgaacgtcttacaattcttgggtttccgttccgatgaaattaagcatcttttcttgtatggtatcgatgtgtacttctgtccagaaggtgtttttactcaatatggtctgtgcaagggttgtcaaaaaatgttcgaattgtgtgtgtgttgggctgggcaaaaggtttcttaccgtagaatggcttgggaagctttagccgtcgaaagaatgttgagaaacgacgaagaatataaggagtatttggaggacattgaaccataccacggtgacccggtgggttatttgaagtacttctctgtaaagagaggagaaatatactctcaaatccaaaggaattacgcttggtatttagctatcactagaaggagagaaactatttctgttttggactctacacggggtaagcagggttcacaagtcttcagaatgagtggtagacagatcaaagagttgtactacaaggtttggagcaacttgcgagaatccaagacggaggtcttgcaatacttcctaaactgggatgagaaaaagtgtagagaggagtgggaagctaaggatgacaccgtatttgtcgaagccttagaaaaggtcggtgtttttcaacgtctaagatctatgacttcagctggtttgcaaggtcctcaatacgtgaaactacaattctccaggcatcaccgtcaattgagatccagatatgaattgtctttaggtatgcatctacgtgaccaattagctttgggtgttacaccatccaaggttcctcactggaccgcttttttgtctatgttgattggcttattttgtaacaagacattcagacaaaagctggaatacttgcttgaacaaatctccgaagtctggctattgccacactggttggatcttgcaaacgttgaagttttggccgccgacaacactagagttccactatacatgctcatggttgccgttcacaaggaattggactctgatgacgtccctgatggtagatttgacatcttactgtgcagagactccagccgtgaagtcggtgagtaa

SEQ ID NO: 4857 - DNA, 621 bp, Artificial Sequence
  Optimized genes for Saccharomyces cerevisiae
atggcttcaactgatttctccaagatcgaaactttgaagcaattgaatgcttctttggctgacaagtcttacattgaaggtactgctgtctctcaagctgacgtcactgttttcaaggctttccaaagtgcatatccagaattcagcagatggttcaaccatatcgcttccaaagctgatgagtttgactctttcccagccgcctctgctgctgccgcagaggaagaagaggatgatgatgttgacctttttggttctgacgatgaagaagccgatgctgaagctgaaaagctaaaggctgaaagaattgctgcttacaatgccaagaaggcggccaagcctgccaaaccagctgcaaaatcgatagtaacattagatgtcaagccatgggatgacgaaaccaacttggaagaaatggttgctaacgtgaaggccattgaaatggaaggcttgacctggggtgctcaccaatttattccaattggtttcggtatcaagaaattacagatcaactgtgttgttgaagatgacaaagtctccttggacgacttgcaacaatccatcgaagaagatgaagaccacgttcaatctaccgacattgccgctatgcaaaagttataa

SEQ ID NO: 4858 - DNA, 1929 bp, Artificial Sequence
  Optimized genes for Saccharomyces cerevisiae
atgtctaaagctgtcggtattgacttaggtactacttactcttgcgttgcccattttgctaatgacagagtcgatatcattgccaacgaccaaggtaacagaaccactccatctttcgttgctttcaccgacactgaacgtctaatcggtgatgctgctaaaaatcaggctgctatgaacccttccaacacagtatttgatgccaagagattgattggtagaaacttcaatgatccagaagtccaagctgatatgaagcactttccattcaagttaattgatgtcgacggtaagcctcaaattcaagtcgaatttaagggtgaaaccaagaactttaccccggaacaaatctcttccatggtccttggaaagatgaaagaaacggcagaatcttacttgggtgctaaggtcaacgacgctgttgttactgtcccagcctatttcaacgattctcaaagacaagcaacaaaagatgctggtacgatagcaggtttgaacgttttgagaatcatcaacgaaccaaccgctgccgccatcgcttacggactggataaaaagggcaaagaagaacacgttttaatcttcgacttgggtggcggtactttcgatgtttcactattatcgatcgaagatggtatttttgaagtcaaggctactgctggtgatactcacttggggggcgaggatttcgataacagattagttaaccatttcatccaagaattcaaaagaaagaacaagaaggatctatctaccaaccaaagagctttgagaagattgcgtactgcttgtgaaagagctaagagaactctttcttcatccgctcaaacttctgttgaaatcgattccttgtttgagggtatcgacttctacacctctattacccgcgctagattcgaggaattatgtgccgatttgttcagatccactttggacccagttgaaaaagtattaagagatgcgaagcttgataagtcccaagttgatgaaattgttttggttggtggttctacaaggattccaaaggttcaaaagttggtcactgactacttcaacggtaaggagccaaaccgtagtattaatccagatgaagccgtggcttacggtgctgccgtgcaggccgcaatcttgactggtgacgaaagctcaaagacccaagatttgttactactggacgtcgctccattgtctttgggcattgaaactgccggtggtgtcatgactaaattaattcctagaaatagcactattcccacaaagaaatctgagatcttttccacctatgctgacaaccaaccaggcgtcttgatccaagttttcgaaggtgaaagagccaagactaaggacaacaacttgttgggtaaattcgagttgtccggtatcccaccagctccaagaggtgttccacaaattgaagttacctttgacgttgactcaaatggtattttgaatgtttctgctgtagaaaaaggtaccggtaagagtaataagattactatcactaatgacaagggtcgtctgtctaaggaagatattgagaaaatggttgctgaagctgaaaagttcaaggaagaagacgaaaaggaaagtcagcgtattgcttccaagaatcaattggaatccatcgcctattcgctaaagaacaccatttctgaagcaggtgacaaattagaacaagctgacaaggacaccgtcaccaagaaggccgaagaaacaatttcctggttggactctaacactaccgcttctaaggaagagtttgatgacaaattgaaggaattgcaagacattgctaacccaatcatgtccaagttgtaccaagccggtggtgctcctggaggggcggctggtggtgccccaggtggtttcccaggtggtgcccctccagcacctgaagctgaaggtccaactgtggaagaagttgattaa

SEQ ID NO: 4859 - DNA, 1503 bp, Artificial Sequence
  Optimized genes for Saccharomyces cerevisiae
atgtctaggctagaaagattgacttctttgaacgttgttgcaggttctgatttgagaagaacctctattattggtactatcggtccaaagaccaacaatccagaaactttggttgctttgagaaaggctggtttgaacattgttagaatgaactttagccatggttcctacgaataccacaagtctgtcattgacaacgctcgtaaatctgaagaattgtatccaggtcgtccattggccattgcattggacaccaagggtcctgagatacgtactggtaccactaccaatgatgttgattacccaattccacctaaccacgaaatgatcttcactaccgatgacaagtacgctaaggcttgtgatgataagatcatgtacgttgactacaagaatatcacaaaagttatttctgctggtagaattatctatgtcgacgatggagtactatctttccaagtcttagaggttgtcgatgacaaaacattaaaggttaaagctttgaatgccggaaaaatttgttctcataagggtgttaatttacctggcacagacgtggatttacccgcgctgagtgagaaagataaagaagacttaagatttggtgttaagaacggtgtccacatggtctttgcttcattcatcagaactgctaacgatgtcttgaccattagagaagtcctcggtgaacaaggtaaggacgtcaaaatcattgtcaagattgaaaaccaacaaggtgtcaacaacttcgatgaaattctgaaggtcactgatggtgttatggttgccagaggtgacttgggtattgaaatcccagctccagaagtacttgctgttcaaaaaaagttgattgccaagtccaacttggctggtaagcctgttatctgtgctactcaaatgttggaatccatgacttacaacccaagaccaaccagagctgaagtttccgatgttggtaatgctattctagacggtgctgactgtgtcatgctttccggtgaaaccgctaaaggtaactatcctatcaacgccgttaccaccatggctgagactgccgtgattgctgaacaggccatcgcttacttgccaaactacgatgatatgagaaactgtaccccaaagccaacttcaacaactgaaactgttgctgcttccgctgtcgccgcagtatttgaacaaaaggcaaaggctatcatcgttttaagtacatctggtactactccaagattagtctccaagtatcgtccaaattgtccaatcattttggtcacccgttgcccaagagccgctagattctcacatttgtacagaggcgttttcccattcgtcttcgaaaaggaaccagtttctgactggactgacgacgttgaagctaggataaattttgggatcgaaaaagccaaggaattcggtatcttgaagaagggcgacacttatgtgtccattcaaggtttcaaggccggtgccggtcactctaacaccttgcaagtttcgacggtgtaa

SEQ ID NO: 4860 - DNA, 513 bp, Artificial Sequence
  Optimized genes for Saccharomyces cerevisiae
atgttgagaactaccagattatggactactagaatgccaactgtctccaaactattcctaagaaattcctctggtaacgccttgaacaagaacaaattaccattcttgtactcttctcaaggtcctcaagctgtgcgttatacatcccaacacgaatggatcgctgttcatcaagataagactgcatttgtcggtatcactaagtacgctaccgatgctttgggtgacgccacatacgttgaattgccagaagttggtaccgaaattgctcaaggtgaaagtctgggatcaattgaatctgttaagtccgccagcgagatttaccaaccagctgacggtactgttgaagaaatcaacaccaacttggaggaaaacccaggtgtcgtaaatgaagacccaatgggtgatggttggttagtcaagatgaagttgggcgaaggtgttaatgttgagcaggtcgaaggtttgatgtctttggaacaatatgaaaagacccttgttcacgacgattaa

SEQ ID NO: 4861 - DNA, 399 bp, Artificial Sequence
  Optimized genes for Saccharomyces cerevisiae
atgtctggtggtaagggtggcaaggctggttctgccgccaaggcttcccagagtcgttcagcaaaagccggtttgactttccctgtcggtagagttcacagattattgagaagaggtaactatgcacaaagaattggttccggtgctccagtttacttgaccgccgtcttggaatacctagctgctgaaatcctggagcttgcgggaaacgctgccagggacaacaagaagactcgtatcattccaagacacttgcaattggctatcagaaacgatgatgaattgaataagttgttgggtaatgtgacaattgctcaaggtggtgttttgccaaacattcatcaaaacttgttaccaaagaaatctgctaagaccgctaaagcttctcaagaattataa

SEQ ID NO: 4862 - DNA, 570 bp, Artificial Sequence
  Optimized genes for Saccharomyces cerevisiae
atggctaacttgagaactcaaaagagattggctgcctccgttgtcggtgttggtaagagaaaggtctggttggacccaaatgaaacctctgaaattgctcaagccaactccagaaacgccattagaaaattggttaagaatggcactattgtcaagaaggctgttactgtacattccaagtcaaggacaagagctcacgctcaatctaaacgtgaaggtagacactctggttacggtaaaagaaagggtaccagagaggcaaggttaccatctcaagttgtttggatcagaagattaagagtcctgcgtcgtttgttggccaagtacagagacgctggtaagatcgacaagcatttatatcatgtgttgtacaaggaaagtaaaggtaacgctttcaagcacaagcgcgcgctagtcgaacacattatccaagctaaggctgatgcacagagagaaaaagctttgaacgaagaagctgaggccagaagattgaagaacagagctgctagagatcgtagagcccaaagagttgctgaaaagcgtgatgcccttctaaaagaagatgcttaa

SEQ ID NO: 4863 - DNA, 603 bp, Artificial Sequence
  Optimized genes for Saccharomyces cerevisiae
atgggtatctcaagagactccagacacaagagatctgccacaggagcaaaaagggctcaattcagaaagaagcgtaaatttgaacttggccgtcaaccagctaacactaagattggtgctaagagaattcactctgtcagaaccagaggtggtaacaagaaatacagagcattgagaatcgaaactggtaacttctcttgggcctctgaaggtatttccaagaagacccgtattgccggtgttgtttatcatccatctaacaacgaattagttagaactaatactttgaccaaggccgctattgtccaaatcgatgctactccattcagacaatggttcgaagctcattacggtcaaaccttgggtaagaagaagaatgtcaaggaagaagagacagtggccaagtctaagaacgctgaaagaaaatgggctgctagagctgccagtgctaagatcgagtcctccgttgaatctcaattttctgctggtcgtctatatgcttgtatctccagcagacctggccagagtggtagatgtgatggttacattttggaaggtgaagaattggctttctacttaagaagattgactgctaaaaaataa

SEQ ID NO: 4864 - DNA, 414 bp, Artificial Sequence
  Optimized genes for Saccharomyces cerevisiae
atgtctggtaacggtgctcaaggtactaaattcagaatttctttgggtttgcctgtcggtgcaatcatgaactgtgctgataatagtggcgccaggaacctatatattattgctgtcaagggctccggttccagattgaacagattaccagctgcttcccttggtgacatggttatggctaccgttaagaaaggtaaaccagaattgagaaagaaggtcatgccagccatcgttgttagacaagctaagtcttggagacgtcgtgatggtgttttcttgtactttgaagacaacgctggtgtcatcgctaacccaaagggtgaaatgaagggttctgccattactggtccagttggtaaggaatgtgccgatttatggccaagagttgcatcaaatagcggagtggtagtctaa

SEQ ID NO: 4865 - DNA, 393 bp, Artificial Sequence
  Optimized genes for Saccharomyces cerevisiae
atggcttctcttcctcatccaaagatcgttaagaagcacaccaagaagttcaagagacatcattcagaccgttatcacagagttgcagaaaactggagaaagcaaaagggtattgactccgtggtccgtagaagattcagaggtaacatctctcaaccaaagattggttacggttccaacaagaaaacaaaatttttatctccatctggtcacaagactttcttggttgccaatgtcaaggatttggaaactttgaccatgcacactaagacctacgctgctgaaattgctcacaatatcagtgccaagaacagagtcgttattctagccagagctaaggctttgggcatcaaagttactaacccaaaaggtagattggccttagaggcttaa

SEQ ID NO: 4866 - DNA, 411 bp, Artificial Sequence
  Optimized genes for Saccharomyces cerevisiae
atggctagaaccaagcaaactgccagaaagtctactggtggtaaggctccaagaaaacaattggcctccaaggccgcacgtaaatctgccccatctacaggcggtgtcaagaaacctcatagatacaagccaggtactgttgctcttcgtgagatcagaagattccaaaaatccactgaattgttgattagaaagttgccattccaaagattagttagagaaattgctcaagatttcaagactgatctaaggtttcagagttcagcaatcggtgctttgcaagaatctgtggaagcttatctggtttccttatttgaagacaccaacttggctgctattcacgccaagagagtcaccattcaaaagaaggacatcaagttagctcgtagattgagaggtgaaagatcttaa

SEQ ID NO: 4867 - DNA, 864 bp, Artificial Sequence
  Optimized genes for Saccharomyces cerevisiae
atgacttataccaccagacaaatcggcgccaagaatactttggaatacaaggtctacatcgaaaaggatggtaagccagtttcagccttccacgatatacccctatatgctgacaaggaaaacaacatcttcaacatggttgtcgaaatcccaagatggactaatgccaaactagagatcactaaagaagaaacattaaatccaattattcaagatacgaagaaaggcaaattgagatttgtcagaaactgtttccctcatcacggttacattcacaactacggtgctttcccacagacctgggaagatccaaacgtttctcatccagaaaccaaggctgttggtgacaacgatcctatcgatgtcttggaaattggtgagaccattgcttacactggtcaagtcaagcaagttaaggcattgggtatcatggctttacttgatgaaggtgaaactgactggaaggttattgccattgacatcaatgacccattggctccaaagttgaacgacattgaagacgttgaaaaatacttcccaggtttgttgcgtgccaccaacgaatggttcagaatttataagattccagacggtaagcctgagaaccaatttgcctttagtggagaagctaagaacaagaagtacgctttggatatcatcaaggaaacccatgactcctggaaacaattgattgctggtaagtctagcgattccaagggtattgacctgacaaatgtaactttaccagatactccaacttactctaaggctgcttccgacgctattccaccagcttctccaaaagcagatgctcctattgataagtccatcgacaaatggtttttcatctctggttctgtgtaa

SEQ ID NO: 4868 - DNA, 936 bp, Artificial Sequence
  Optimized genes for Saccharomyces cerevisiae
atgctatcgagaatcgtaagcaataatgccacaagatctgttatgtgtcatcaagctcaagttggtattttgtataagactaatcctgtcagaacttacgccacgttaaaagaagttgaaatgagattgaagtccatcaagaatattgaaaaaataactaagaccatgaagattgtcgcaagtaccaggctgtccaaggccgagaaggctaaaatttctgcaaagaagatggatgaagcagagcagctattttacaagaacgctgaaaccaagaacttggacgtggaagctactgaaactggtgcccctaaggaattgatcgttgctattacttccgataagggtttatgtggttccattcattctcaattggctaaggctgtccgtcgtcacttgaacgatcaaccaaatgctgatattgttaccattggtgataaaatcaaaatgcaattattgagaactcacccaaacaacattaaattgtccattaacggtatcggcaaggacgctccaactttccaagaatctgctttgattgctgacaagcttttgtcagtcatgaaagctggtacctacccaaagatctctattttttataacgacccagtttcttctttgtctttcgaaccatctgaaaagccaattttcaacgccaagacaatcgaacaatctccctcattcggtaagttcgaaattgacaccgatgctaacgttccaagagatttgtttgaatacactttggccaaccaaatgttgactgctatggctcaaggttacgctgctgagatttccgctagaagaaacgccatggacaacgcaagcaaaaatgccggtgacatgatcaaccgttattctatcttgtacaacagaaccagacaagccgtcatcaccaacgaattagttgatatcatcacaggtgcttcttccttaggataa

SEQ ID NO: 4869 - DNA, 471 bp, Artificial Sequence
  Optimized genes for Saccharomyces cerevisiae
atgtctactgaattgactgtccaatctgaaagagccttccaaaagcaaccacatatctttaacaacccaaaggtcaagaccagtaaacgtacaaaaagatggtacaagaatgctggtctaggtttcaagactccaaaaactgctattgaaggttcttacattgacaagaagtgtccattcactggtttggtttccatcagaggtaagatcttaaccggtaccgtggtatccaccaagatgcacagaactattgtcattagaagagcttacttgcactatattccaaagtacaacagatatgagaagagacacaagaacgttccagttcatgtctcacctgcatttagagttcaagttggtgatattgttaccgtcggtcaatgtcgtcctatctccaaaacagttagattcaacgtcgttaaggtttctgctgctgccggcaaggctaataaacagtttgccaagttctaa

SEQ ID NO: 4870 - DNA, 633 bp, Artificial Sequence
  Optimized genes for Saccharomyces cerevisiae
atgtctgtttctaagattgctttcgttttgtctgctatcgcttcccttgccgtggctgatacatctgctgcggagactgctgaattgcaggctattattggtgacatcaactcccacctatctgactacttgggtttggaaactggtaactctggtttccaaatcccatccgacgtcttgtccgtataccaacaagttatgacttatactgatgatgcttacaccaccttattttctgagttggactttgatgccatcaccaagaccattgttaagttgccatggtacactaccagattaagttcagaaattgccgctgccttggcttctgtctctccagcttcatctgaagctgcctctagctctgaagccgcctcctcaagcaaagctgcatccagctcggaagctacttcctcggcagccccatcttcttccgctgctccttccagttctgccgcaccttcatccagtgctgaatcttcttccaaggctgtctcttcatccgttgctccaactacaagttccgtctccacgtctactgttgaaaccgcttctaacgccggtcaaagagttaatgctggtgctgcatctttcggtgctgttgtcgctggcgccgcggctttgctgttataa

SEQ ID NO: 4871 - DNA, 1290 bp, Artificial Sequence
  Optimized genes for Saccharomyces cerevisiae
atgcaattcaagaatgcacttaccgctactgccatcttgtctgcatctgccttggccgccaattccactacctccattccatcttcttgttctattggtactagtgccactgctaccgcccaagctgatctagacaagatttctggttgttccaccatcgtaggtaatttaaccattactggcgatttgggttccgctgccctagcttccatccaagaaattgacggttctttgactatcttcaactcctcttctttgtccagtttctctgctgactctatcaagaagatcaccggtgacttgaacatgcaagaattgattattttgacctctgcctccttcggttctctacaagaggtggattcaataaatatggttaccttacctgctatctctactttctctaccgatttgcaaaacgctaataacatcattgtctccgacactacactggagtccgttgaaggtttctccacactcaagaaagtgaacgtctttaacattaacaacaacagatacttgaactctttccaatccagcttggaatccgtctctgactccctgcagtttagcagcaatggtgataacaccaccttggctttcgacaacttggtctgggctaacaatatcactttacgtgatgtcaacagtatctcctttggttcattgcaaaccgttaacgcctctttagggttcatcaacaacactttgccatccttgaatttgactcaattatcaaaggttggtcaatctcttagtattgtttccaacgatgaattatccaaggctgctttttctaacttgaccactgttggtggtggttttatcattgctaacaacacacaattgaaagttattgatggtttcaacaaggttcaaactgtaggcggcgctattgaagttactggtaacttcagcactttggacctttcatcgctaaaatctgttagaggtggtgcaaactttgattcttcttcctccaatttctcatgcaatgctttgaagaagttgcagtctaacggagccattcaaggtgactcttttgtttgtaagaacggtgctacttctacttctgtcaagttatcttccacgagtactgaatcttctaagtctagtgctacatcatctgcttcttcgtccggtgatgcttctaatgctcaagccaacgtttctgcttcagcaagctcatcctcgtcgagctctaaaaaatccaagggtgccgctccagaattggttccagctacatctttcatgggtgtcgtcgctgctgtcggtgttgctttgttataa

SEQ ID NO: 4872 - DNA, 447 bp, Artificial Sequence
  Optimized genes for Saccharomyces cerevisiae
atgtcttcctccaagagaattgctaaggaattgtccgacttggaaagagatcctccaaccagctgctcggcaggcccagttggtgatgatttgtaccattggcaagcttctatcatgggtcctgctgactctccttatgccggtggtgttttctttttaagtattcacttcccaactgactacccattcaagccaccaaagatttcttttaccacaaaaatttaccacccaaacatcaatgctaacggtaacatttgtttggatatcttgaaggaccaatggtctccagctttgactttgtctaaagttcttctatccatctgttcattactgactgatgccaacccagatgacccattggtcccagaaattgcccatatctacaagaccgacagaccaaaatatgaggctactgctcgtgaatggactaagaagtacgctgtctaa

SEQ ID NO: 4873 - DNA, 567 bp, Artificial Sequence
  Optimized genes for Saccharomyces cerevisiae
atgaacccacaagtttctaatatcatcattatgttggtcatgatgcagctttccagaagaattgatatggaagatccaacaataatcatgtacatcagaatcctatattgttcatccatcggtatttcttggattatttaccaaatggccagaaagcgtattgttgctaagaacgacatgactactatgaagtacgttgaaccaggtaacgccatgtctggtgaaggtgagaaactgcaagtcaccactgttcgtgactacgatttgaaggaaattgactctgctatcaagagcatctacactggtatggctatgatgggtttcatgcatttgtacttgaaatataccaaccctttatttatgcaatctattagtcctgtgaaatccgctttggaacacaacgaagttaagattcacttattcggtaagccagctaccggtgacttgaagagaccattcaaggctccatctttgtttggtggtatgggtcaaaccggcccaaagactgataagaagtccattgaagaagctgaaagagctggtaatgccggtgtcaaagcagagtaa

SEQ ID NO: 4874 - DNA, 483 bp, Artificial Sequence
  Optimized genes for Saccharomyces cerevisiae
atgggtaaatctcatggttacagatccagaaccagatacatgttccaaagagatttcagaaagcacggtgctgtccatttatcaacatatttgaaggtttacaaggtcggtgacattgtcgatatcaaggctaacggttccatccaaaagggtatgccacacaagttctaccaaggtaagaccggtgttgtctacaacgttaccaagtctagtgtaggcgttattatcaacaagatggttggtaacagatatctagagaaaaggttgaacttgagagttgaacacatcaaacattccaagtgtcgtcaagaatttttggaaagagtcaaggccaatgctgccaagagagctgaagctaaagcccaaggtgtcgcagttcaattaaaacgtcagccagctcaaccaagagaatctcgtattgtttctactgaaggtaatgtgcctcaaactttggctccagttccatacgaaacttttatttaa

SEQ ID NO: 4875 - DNA, 1665 bp, Artificial Sequence
  Optimized genes for Saccharomyces cerevisiae
atgtctaataactcctttaccaacttcaaactagcaacggagttgccagcttggtctaagctacagaaaatatatgaatctcaaggtaaaactttaagtgtcaagcaagaattccaaaaggacgccaagagatttgaaaagttgaacaagaccttcacaaactacgatggttccaagattttgtttgactactccaaaaacttggtgaatgacgaaattattgctgcccttatcgaacttgctaaagaagccaatgtcaccggtttgagagatgctatgtttaaaggtgaacacattaatagcactgaagacagggctgtctaccacgttgcactaagaaacagagctaacaagccaatgtatgtcgatggcgttaacgttgctccagaagttgactctgttttgaaacacatgaaggagttctccgagcaagtccgttcaggagaatggaagggttacactggtaagaagatcactgatgtcgtcaacattggtattggtggttctgatttaggtccagttatggttacagaggctttgaagcattacgctggtgtcttggatgttcatttcgtttctaatattgacggtacccatattgccgaaacactgaaggttgttgatcctgaaactaccttgtttttgatcgcttccaagacttttactactgctgaaaccattaccaatgccaacactgccaagaactggttcttatctaaaacaggtaacgacccttctcacatcgcaaagcacttcgctgccctcagtaccaacgaaactgaagtcgctaagttcggcattgataccaagaacatgttcggtttcgagtcttgggttggtggtcgttattccgtttggtccgctattggtctatcagtggccttatacatcggctatgacaactttgaagctttcttgaagggtgcggaggcagtagataaccactttactcaaactccattggaagataatatccctttattgggtggtttgttgtctgtctggtacaacaactttttcggtgctcaaacacatttggttgccccattcgatcaatacctacacagattcccagcctacttgcaacaattatccatggaatccaacggtaagtctgtaaccagaggtaatgtgtttaccgattattctaccggaagcatcctttttggtgaaccagctactaacgcccaacattctttcttccaattggtccaccaaggtactaagttaattccatctgacttcattttggctgctcagtcccacaacccaattgaaaacaaattgcatcaaaagatgttggcttcaaacttctttgctcaagctgaagctttgatggtcggtaaggatgaagaacaagttaaggctgaaggtgccactggtgggctggttccacacaaggttttctctggtaacagaccaaccacttctatcttggcacagaaaatcacccccgcgactttgggtgctttgattgcttactacgaacatgttactttcaccgaaggtgctatctggaacatcaattcattcgaccaatggggtgttgaattaggcaaggtcctggccaaagttatcggtaaggaattggacaattcgagtacgatttccactcatgacgcttctactaatggtttaatcaaccaattcaaggaatggatgtaa

SEQ ID NO: 4876 - DNA, 1614 bp, Artificial Sequence
  Optimized genes for Saccharomyces cerevisiae
atgcacttctccttgaagcaattggctgttgctgctttttatgctacaaacttgggttccgcctacgtcattcctcaatttttccaagaagccttccaacaagaagaaccaatcgaaaactacttgccacaactgaatgacgatgattcatctgctgtcgccgccaacattcccaaacctcacattccgtattttatgaagccacatgtggaatctgaaaagttgcaagataagatcaaggtcgacgacttgaacgccactgcctgggatttgtataggttagctaactactctactccagattacggtcatccaaccagagtaattggttctaagggtcacaacaagaccatggaatacattttgaatgtcttcgatgacatgcaagactattatgatgtctctttgcaggaatttgaagctttgtctggcaaaatcatctctttcaacttgtccgatgctgaaacaggaaagtcctttgccaacactactgcttttgctctatctccaccagtcgatggttttgtcgggaaactagtagaaatcccaaacctaggttgtgaagagaaggactatgcttcggtggtcccacctcgtcacaatgaaaaacaaattgccttgattgaaagaggtaagtgtccattcggtgacaagtctaacttggccggtaaatttggtttcacggcagttgtcatctacgacaacgaaccaaagagcaaagaaggtttgcatggtactcttggtgaacctacaaagcacactgttgccaccgttggtgttccatacaaggttggtaagaagcttatagcaaatatcgctttaaacatcgattactccttgtacttcgctatggattcttacgttgaattcattaagactcaaaacattattgctgacaccaagcacggtgatccagacaatattgttgctttgggtgcccatagcgactccgttgaagaaggtccaggtattaacgatgacggatctggtaccatttcattactaaacgttgctaagcaattgactcactttaaaatcaacaacaaagtgcgtttcgcttggtgggctgccgaagaggagggtttactgggcagtaacttctacgcttacaacttaactaaggaagaaaattccaagatcagagttttcatggactacgatatgatggcttccccaaattatgagtacgaaatttatgacgcgaacaataaggaaaacccaaaaggcagtgaggaattaaagaatttatacgttgactactacaaggctcatcatttaaattacactttggttcctttcgacggtagatctgattatgtcggttttatcaataatggtattccagctggtggtatcgcaactggtgctgaaaagaacaacgtcaacaacggtaaagttttggacagatgctaccatcagttgtgtgatgatgtttccaacctctcttgggacgctttcatcaccaacaccaaattgattgctcactctgttgcaacctacgccgactcattcgaaggtttcccaaagagagaaacccaaaagcacaaggaagttgatatcttgaacgctcaacaaccacaattcaagtacagagctgatttcttgatcatttaa

SEQ ID NO: 4877 - DNA, 1095 bp, Artificial Sequence
  Optimized genes for Saccharomyces cerevisiae
atgtctgccccaaagaagatcgttgttttgccaggtgatcatgtcggtcaagaaataacagcagaggccatcaaggtcttgaaggctatttctgacgttagatccaacgtcaagttcgattttgaaaaccatttaattggtggtgccgcaattgacgctaccggagttccattgccagacgaagctttggaagcttccaagaaagctgatgccgtcctattaggtgctgttggcggtccaaaatggggtaccggttctgtcaggcctgagcaaggtttattgaagatcagaaaggaactgcagttgtacgctaacttgagaccatgtaactttgcgtcagattcacttttggatttgtctccaatcaagccacaatttgccaagggtactgacttcgtcgtggtacgtgaattggttggtggtatctacttcggtaagagaaaagaagatgatggtgacggtgttgcttgggactctgaacaatacactgtcccagaagtccaaagaattaccagaatggctgctttcatggccttgcaacacgaaccaccactacctatctggtctttggacaaggctaatgtcttagcttcttctagattatggagaaagactgttgaagaaaccatcaaaaatgaattcccaactttgaaagttcaacaccaattgattgattccgctgccatgattcttgtaaagaatccaacacatttgaacggtatcattattacttctaacatgttcggagacatcatctctgatgaagcatcggttatcccaggcagcctcgggttgttgcctagcgcatccttggcctccttacctgacaaaaacactgcttttggtttgtatgaaccttgtcacggtagtgctccagatctaccaaagaacaaggttaacccaattgctaccattctatctgctgctatgatgttgaaattgtccctgaacttacccgaggaaggtaaggccattgaagacgccgttaagaaggttttagatgctggtattcgtactggtgacttgggtggttccaatagtaccactgaagttggtgatgctgtcgctgaagaggtgaaaaagattttggcttaa

SEQ ID NO: 4878 - DNA, 2400 bp, Artificial Sequence
  Optimized genes for Saccharomyces cerevisiae
atggttttgccaattttgccattaattgacgatttagcctcctggaactctaagaaagaatatgtttctttagtcggccaagtcttgttggatggttccagtctttccaacgaagaaatattgcagttttcgaaagaggaagaagttccattggttgctttgtctttgccttctggtaagttctccgatgatgaaatcattgctttcttgaacaacggtgtttcctctttgtttattgccagccaggacgctaagaccgctgaacacttggtcgaacaattgaatgttccaaaggaacgtgtcgttgtggaggaaaatggtgtcttctctaaccaattcatggtcaagcagaaattttctcaagataaaattgtctccatcaagaagctttccaaggatatgttgaccaaggaagtactaggtgaggtcagaactgaccgtcctgatggtctttacaccactttggttgtcgaccaatatgaaagatgtttgggtttagtatattcttccaagaaatctatcgccaaggccatcgatttgggtagaggtgtttactactctagatctcgtaatgaaatttggattaagggtgaaactagtggtaacggtcaaaagttgttacaaatctccaccgactgtgattctgacgcgttgaaattcatcgttgaacaagagaacgtcggtttctgtcacttggaaaccatgtcctgtttcggtgaattcaagcacggtttggttggattagaatccttattgaagcaaagattgcaagatgctcctgaagaatcttacaccagacgtttattcaacgactctgctttactagatgcaaagatcaaggaagaagctgaagaattgacagaggctaaaggtaagaaggagttgtcttgggaagctgccgacttgttctactttgccttggccaagctagttgccaatgatgtctcattaaaagacgtggaaaacaacttgaacatgaaacatttgaaggttactagaagaaagggcgacgctaagccaaagtttgttggtcaaccaaaggctgaagaagaaaaattgactggtccaattcacttagacgttgttaaggcaagtgacaaagttggcgttcaaaaggctttgtcaagaccaatccaaaaaacttctgaaatcatgcatttggtcaacccaatcatcgaaaacgttagagacaagggtaactccgcattgttggaatacactgaaaagtttgatggtgtcaagctctcaaatccagtcctgaatgctccattccccgaagaatactttgaagggctcacagaagaaatgaaggaagccttggacttatctattgaaaacgttaggaagttccacgctgctcagctaccgactgaaacactggaagttgaaactcaacctggagttctttgctccagattcccacgtcctattgagaaagtgggtttgtacattcctggtggtacagctatcttgccatctactgctttgatgctgggggtcccagcacaagttgctcaatgtaaggaaattgtctttgcttccccaccaagaaagtctgatggcaaggtctctccagaagtcgtctacgttgccgaaaaggttggtgcttctaagatcgtattggctggtggtgcccaagctgtggccgctatggcttacggtaccgagactattccaaaagtcgataagatattaggtcccggcaaccaatttgtcaccgcggccaagatgtacgtccaaaacgatacccaagctctatgcagcatcgacatgccagctggtcctagtgaagttttggtcattgctgacgaagatgctgatgttgatttcgttgctagcgatttgctgtcgcaagcagaacatggtattgattcccaagttatcctagtaggagtgaatctgtcagaaaagaagattcaagaaattcaggatgccgttcacaaccaagccctacaattaccaagagttgacattgttaggaagtgtatcgctcattctaccattgttttgtgtgacggttacgaagaggcattggaaatgagcaatcaatacgctccagagcatttaatcttgcaaattgctaatgccaacgattacgtgaaattagttgacaacgccggttctgttttcgtcggtgcttataccccagaatcttgtggtgactactcctccggtactaaccatacgcttccaacttatggttatgctagacaatattcaggtgctaacaccgccactttccaaaagttcattactgctcaaaacatcactccagaaggtctagagaatattggtagagctgtcatgtgtgttgcaaaaaaggaaggtttggacggtcacagaaacgctgttaaaatcagaatgtctaaattgggtttgattccaaaggacttccaataa

SEQ ID NO: 4879 - DNA, 333 bp, Artificial Sequence
  Optimized genes for Saccharomyces cerevisiae
atggtttcccaagaaaccatcaagcacgttaaggacttgattgctgaaaacgaaatcttcgtggcctctaaaacatattgtccatactgtcacgctgctttgaacaccttatttgaaaaattgaaggtccctcgttctaaggttttggtcttacagttgaatgacatgaaggaaggtgctgacattcaagctgccttgtacgaaattaatggtcaaagaactgttccaaacatctacatcaacggtaagcatattggtggtaacgatgatttgcaagagttgagagaaactggtgaattggaagaactattagagccaattcttgcaaactaa

SEQ ID NO: 4880 - DNA, 1503 bp, Artificial Sequence
  Optimized genes for Saccharomyces cerevisiae
atgtcttttgatgacctgcacaaggctactgaaagagctgttattcaagctgtcgatcaaatttgcgatgatttcgaagtcactccagaaaaattggacgaattgactgcttatttcatcgaacaaatggaaaagggtctagctccaccaaaggagggtcacactttggcttctgacaaaggtttgcctatgattccagcctttgtcaccggttccccaaacggtaccgaaagaggtgttcttctagccgctgatttgggtggtaccaacttcagaatctgttccgttaacttgcatggtgaccacacatttagtatggaacaaatgaaatccaagatccctgacgatttattggatgatgaaaacgttaccagcgatgacttgtttggtttcttggccagaagaactttagctttcatgaagaagtatcatccagacgagctcgccaagggcaaggatgctaagccaatgaagttgggattcactttcagttatccagtggaccaaacctccttgaactccggtactttgattagatggactaagggtttcagaattgctgacactgttggtaaggacgtcgtacagttgtaccaagagcaattgtctgctcaaggtatgccaatgatcaaggttgttgccttgaccaatgataccgtaggaacttacttgtcccattgttatacctcagataacactgactcaatgacttctggtgaaatctctgaaccagttatcggttgtatcttcggtacaggcacaaatggctgttacatggaagaaatcaacaagattaccaagctgcctcaagaattgagagataaactaattaaggaaggtaagactcacatgattattaatgttgaatggggttctttcgacaacgaattaaagcacttgcctaccactaagtacgatgttgtcatcgaccaaaaattatccacgaacccagggttccatttatttgaaaagagagtttctggtatgtttttgggtgaagttttgagaaacattttggttgatttgcactctcaaggtctattgttgcaacaatacagatctaaagaacaattaccaagacacttaaccaccccattccaattgtcttccgaggtcttatctcacattgaaattgacgactctactggtttaagagaaactgaactatctttgctacagagcttgcgtttgccaactacacccacggaacgtgttcaaatccaaaagttagtcagagccatttctaggcgtagtgcttacttagcagccgttccattggctgccatcttgatcaaaaccaatgctttaaacaaacgttaccacggtgaggtcgaaattggttgtgatggttctgtggtggaatactacccaggttttagatccatgttgagacatgcgcttgcactttcgcctctgggcgctgaaggtgaaagaaaggtccatttgaagatagcaaaagacggttcaggtgtcggtgctgctttgtgtgctttggtcgcttaa

SEQ ID NO: 4881 - DNA, 1569 bp, Artificial Sequence
  Optimized genes for Saccharomyces cerevisiae
atgaagttctccgctggtgctgtgctatcctggtcttctttgttgttagcatcgagcgtctttgcccaacaagaagctgttgccccagaagacagtgcggttgtcaaactggctactgactctttcaacgagtacattcaatctcatgacctggtactagctgaattcttcgctccatggtgtggtcattgtaaaaatatggctcctgaatatgttaaggctgctgaaaccttggtggaaaagaacattactttggctcaaatcgactgtaccgaaaaccaagacttgtgtatggaacacaacatcccaggtttcccatctttaaaaattttcaagaactctgatgtcaacaactccattgattacgaaggtccaaggacagcagaggccatcgttcaattcatgatcaagcaatcccaaccagccgttgctgtcgtcgctgatttgccagcttaccttgctaacgaaactttcgttactcctgttatcgtccaatctggtaagatcgatgctgacttcaatgctaccttctactccatggccaacaagcatttcaacgactacgattttgtctctgctgaaaacgctgatgacgatttcaaattgtctatctacttgccttccgccatggacgaaccagttgtttacaacggcaagaaagctgacattgccgatgccgacgtgttcgaaaaatggttgcaagttgaagctttgccatacttcggtgaaattgatggttccgtttttgctcaatacgtcgaaagtggattacctttgggttatttattctataatgacgaagaagaattggaggaatacaagccattgttcactgaattagctaaaaaaaacagagggttgatgaactttgtttccatcgacgctagaaagtttggtagacacgccggtaacttgaacatgaaagaacaatttccattatttgccattcacgacatgaccgaggatttgaagtacggtctacctcaattgagcgaagaagcctttgatgaactatcggacaagattgttttggaatccaaggctatcgaatcattggtcaaggatttcttgaagggtgatgcttctccaattgtcaagtcacaggaaatctttgaaaatcaagatagttcagtcttccaattagttggtaagaatcatgatgagatagttaacgatccaaagaaggacgtcctagtcttgtactacgctccatggtgtggccattgcaagagattggctccaacttaccaagaattggcagacacctatgctaatgccacatctgacgtgttgattgctaagttggaccacactgaaaatgatgttagaggtgttgttattgaaggttacccaaccattgtattatatcccggtggtaagaagtctgaatctgtcgtttatcaaggttctcgttccttggattctttgtttgactttattaaggaaaacggtcacttcgatgttgacggtaaagccctttatgaagaggcacaggaaaaggccgctgaagaagctgacgctgatgccgagctcgcagatgaagaagatgcaatccacgatgagttataa

SEQ ID NO: 4882 - DNA, 1251 bp, Artificial Sequence
  Optimized genes for Saccharomyces cerevisiae
atgtctctttcgtccaagttatccgtccaagatttagatttgaaggataagagagtcttcatcagagttgatttcaacgttccattggatggtaaaaagattacctcaaatcagaggattgttgccgccttgccaactatcaagtatgtactcgagcatcatccaagatacgtcgttttggcttcccacttgggtcgtccaaatggtgaaagaaacgaaaaatactctctagccccagttgctaaggagttgcaatctttgttaggtaaggacgtgacatttttgaacgactgtgttggacctgaagttgaagctgctgtcaaggcatccgctccaggttccgttatcttgctagaaaacttgagatatcatattgaagaagagggttctagaaaggtggacggtcaaaaagttaaagcttctaaggaagatgttcaaaagttcagacacgaattgtcaagtttggccgatgtctacatcaacgatgcctttggtactgcccacagagctcacagctccatggttggtttcgacttgcctcaaagagccgctggctttttactagagaaggaactaaagtacttcggtaaggctttagaaaatccaaccagaccattcttagccattttgggtggtgccaaggttgcagacaagatccaattgattgataaccttctggacaaggtcgactctatcatcataggcgggggtatggctttcactttcaagaaagtcttggaaaacactgaaatcggtgattctattttcgataaagctggtgctgaaattgtaccaaagttgatggaaaaggctaaagcgaagggtgtcgaggttgtcttacctgttgactttattattgctgatgctttttctgctgacgctaatactaagactgttaccgacaaagaaggtattccagctggttggcaaggtttggacaacggtccagaatctcgtaaattgttcgctgctacagtggcaaaggccaagaccattgtctggaacggccctccaggtgttttcgaatttgaaaagtttgctgccggtaccaaggctttgttggatgaagttgttaagtcttctgccgcaggtaacaccgtcatcattggtggtggtgacactgctactgtcgctaagaagtacggtgtcactgacaaaatcagccacgtttccacgggaggcggtgctagtctggaattattggaaggtaaggaattgcccggtgttgctttcttgtctgaaaaaaaataa

SEQ ID NO: 4883 - DNA, 1086 bp, Artificial Sequence
  Optimized genes for Saccharomyces cerevisiae
atgaaaggtttgatattagttggcggttacggtacacgtttgagaccattgactttgacagtgcctaaaccattggtcgaattcggtaacagaccaatgattttgcatcaaatcgaagcactagccaacgccggtgttactgatattgtattagctgttaactacagacctgaggttatggttgaaaccttaaagaaatacgaaaaagaatatggtgtcaacatcactttctctgtcgaaactgaacctttgggtactgctgggcccctaaaacttgctgaagacgttttgaagaaggacaattctccattttttgtcttgaactcggatgtcatttgtgaatacccattcaaggaattggccgatttccacaaggctcacggtggtaagggtaccattgttgctaccaaggtcgacgaaccatccaagtatggagttatcgtccacgacattgccactccaaacttgattgacagattcgtggagaagccaaaggaatttgttggtaaccgtatcaacgctggtttatatatcttgaacccagaagttattgatttgattgaaatgaagcctacttctattgaaaaagagaccttcccaattttagtggaagaaaagcaattgtactctttcgacctggagggtttctggatggacgtgggccagccaaaagattttttgtccggtaccgtcttatacttgaattcccttgcaaagagacaaccaaagaagttggctactggtgctaacattgtcggcaatgctttgatcgatccaactgccaagatctcaagtaccgctaagattggtccagatgttgtcatcggacctaatgtaacgatcggtgacggtgttagaattaccaggagcgttgttctatgcaattcaactatcaagaaccattctttggttaagtctaccatcgttggttggaactccacagtcggtcaatggtgtagattggaaggtgtcactgtcttaggtgatgatgttgaagtcaaggatgaaatttacattaacggtggtaaggttttgccacataaatccatttctgacaacgttccaaaggaagctatcatcatgtaa

SEQ ID NO: 4884 - DNA, 171 bp, Artificial Sequence
  Optimized genes for Saccharomyces cerevisiae
atggctcacgaaaacgtctggttctctcatccaagaagatttggtaagggttccagacaatgtagagtttgctcttctcacactggtttagttagaaagtacgatttgaacatctgtcgtcaatgtttcagagaaaaggccaatgacattggtttccataaatatcgttaa

SEQ ID NO: 4885 - DNA, 180 bp, Artificial Sequence
  Optimized genes for Saccharomyces cerevisiae
atgaccattgctccaattactggtactatcaagagaagagttatcatggatattgtcttaggcttttctttgggtggtgttatggcttcctactggtggtggggtttccacatggacaagatcaacaagcgtgagaaattctatgccgaattggctgaaagaaagaagcaagaaaactaa

SEQ ID NO: 4886 - DNA, 342 bp, Artificial Sequence
  Optimized genes for Saccharomyces cerevisiae
atggctggtttgaaggacgtggtaactagagaatacaccatcaatctacacaagagattacatggtgtctctttcaagaagagggccccaagagctgtcaaggaaatcaagaaatttgcaaagttgcacatgggtaccgatgatgttcgtttggctccagaattgaaccaagctatttggaaaagaggtgttaagggtgttgaatacagattgagacttcgtatttccagaaagagaaacgaagaagaagacgccaagaacccattgttctcatatgtcgaacctgttttagttgcttctgccaaaggcttgcaaactgttgttgtcgaggaagatgcttaa

SEQ ID NO: 4887 - DNA, 321 bp, Artificial Sequence
  Optimized genes for Saccharomyces cerevisiae
atgtctactgaaagtgcactatcatacgccgccttgattttggctgactccgaaattgaaatctcctctgaaaaattgttgactttgaccaatgctgctaacgttccagttgaaaacatctgggctgatatttttgctaaggctttggacggtcaaaacttgaaggaccttttagtcaacttctctgctggtgctgccgctccagctggtgttgccggtggtgtcgcgggaggtgaagcaggcgaagctgaagctgaaaaggaggaggaagaagccaaggaagaatctgatgatgacatgggtttcggtttattcgattaa

SEQ ID NO: 4888 - DNA, 600 bp, Artificial Sequence
  Optimized genes for Saccharomyces cerevisiae
atggctatctccaagaacttgccaatcttgaagaatcattttagaaagcactggcaagaaagagtcaaagtgcatttcgaccaagctggtaagaaggtctccagacgtaatgccagagctactagggccgccaagatcgcacctaggcctctggatttgctaagaccagttgttagagccccaaccgtcaagtacaaccgtaaagtcagagccggtagaggtttcactttagctgaagttaaggccgcgggccttactgctgcatatgctagaaccattggtatcgccgttgaccacagaagacaaaacagaaaccaggaaatctttgatgctaacgtccaaagattaaaggaataccaatctaagattattgttttcccaagaaacggtaaagctccagaagccgaacaagttttgtcagctgctgccacctttccaattgctcaaccagctacagacgtagaggcacgtgctgttcaagataatggtgaatctgctttcagaactttgagattggctagatctgaaaaaaagttccgtggtattagagaaaagagagctcgtgaaaaggctgaagctgaagctgagaagaagaaataa

SEQ ID NO: 4889 - DNA, 477 bp, Artificial Sequence
  Optimized genes for Saccharomyces cerevisiae
atggaaccattgatatccgcaccttacttgaccactaccaagatgtctgctccagccactttggatgctgcttgtatcttctgtaagatcattaaaagtgaaattccatctttcaagttaattgaaaccaaatattcatacgcttttttagatatccaaccaactgctgaaggccatgccctaatcatccctaagtaccacggtgctaaattacacgacattccagatgaattcttgactgatgccatgccaattgccaaaagattggctaaggctatgaagctagacacttacaatgtcttgcaaaacaacggtaaaattgctcaccaagaagttgatcatgtccacttccatttaatcccaaagagagacgaaaagtctggtttgattgttggttggccagctcaagagacagactttgacaagttgggtaagcttcacaaggaattgctggccaagttggaaggttccgattaa

SEQ ID NO: 4890 - DNA, 321 bp, Artificial Sequence
  Optimized genes for Saccharomyces cerevisiae
atgtctgactctatcatttcctttgctgctttcatcttggctgacgctggactagaaatcacttcagacaatttattgactattaccaaggccgctggtgctaacgttgacaacgtctgggctgatgtctacgctaaggctttggaaggtaaggatttgaaggaaattttgtccggtttccacaacgctggtccagttgctggtgctggcgcagcttctggtgccgccgcagccggtggtgatgctgccgccgaagaagaaaaagaggaggaagctgctgaagaaagtgatgatgacatgggtttcggtttatttgattaa

SEQ ID NO: 4891 - DNA, 261 bp, Artificial Sequence
  Optimized genes for Saccharomyces cerevisiae
atgttgaacagatgtatttctagaaacactcgtttaccagttaacttgagaattgcctccagattctactctgatggcccattgggtggtgctggtccaggtaaccctcaagatatttttatcaagagagaaagagctaaggaagactactatgccagacaacaagaacgtgaacaattggctcatgtcaaggagcagttgaaggaacacaagaagaaattagaaaatttggaaaacaagatcaacaatctatcaaaataa

SEQ ID NO: 4892 - DNA, 546 bp, Artificial Sequence
  Optimized genes for Saccharomyces cerevisiae
atgggtctatatgcttccaagttattctccaatctattcggtaacaaggaaatgagaatcttgatggttggtttggatggtgctggtaagaccaccgttttgtacaagttgaaattgggtgaagttatcaccactattccaaccattggtttcaacgttgaaactgttcaatacaaaaatatttctttcactgtctgggatgtcggtggtcaagacagaattcgttcattatggagacactactacagaaacactgaaggtgttatttttgtcattgactctaacgatagatctcgtatcggtgaggcaagagaagtcatgcaaagaatgttgaacgaagacgaattgaggaatgctgtatggttggtgtttgccaataagcaagatttgcctgaagctatgtctgctgctgaaattacagaaaagcttggcctgcatagtatcagaaacagaccatggttcatccagtccacttgtgccacttctggtgaaggtttatatgagggattggaatggttatccaacaacttgaagaaccaaagctaa

SEQ ID NO: 4893 - DNA, 1287 bp, Artificial Sequence
  Optimized genes for Saccharomyces cerevisiae
atgactgccgctaaaccaaacccatacgctgccaagccaggtgattatttgtctaacgttaacaacttccaattgattgacagtactttgagagaaggtgaacaattcgctaacgctttctttgatactgaaaagaagatcgaaatcgccagagctttagatgattttggtgttgactatattgaattaacatctccagtcgcttccgagcaatctagaaaggactgtgaagctatctgtaagttgggtctgaaggccaaaattctaacacacattagatgtcacatggacgatgccaaggttgccgtcgaaaccggggtagatggtgttgatgttgttatcggtacctcgaagtttttgcgtcaatactctcacggtaaggatatgaactacattgcaaagtcagcagtggaggtgatcgaatttgtcaagtccaagggtattgagatcagattctcttctgaagactccttcagatctgatttggtcgacttgctaaacatttacaagacagtggacaagattggtgtcaacagagtcggtattgctgacactgttggttgcgccaacccaagacaagtctatgaactcattcgtaccttgaagtctgttgtctcatgtgatattgaatgtcatttccataatgacaccggttgtgccattgccaatgcttacactgctttggaaggtggtgctaggctaattgatgtctctgtcttaggaataggcgaaagaaacggtatcactcctcttggcggtttgatggctagaatgattgttgctgctccagactacgttaagagcaaatataaattgcataaaatacgtgacattgaaaacttggttgctgatgctgttgaagtcaatatcccattcaacaatccaattactggtttctgcgccttcactcacaaggctggtatccacgcaaaagcaatcttggccaaccctagtacttacgaaattttggacccacatgacttcggtatgaagagatacatccattttgctaatagattgactggttggaacgctattaaggctcgtgtagatcagttaaatcttaacttaaccgatgaccaaatcaaggaagttactgcgaaaatcaaaaaattaggtgacgtcagatccttgaacatcgatgacgttgactctatcatcaagaactttcacgctgaagtttccacccctcaagttttgtccgccaagaaaaacaagaagaatgattccgatgttccagaattggctaccattccagctgctaagagaaccaagccctctgcttaa

SEQ ID NO: 4894 - DNA, 363 bp, Artificial Sequence
  Optimized genes for Saccharomyces cerevisiae
atggctggtgtcaaggcctatgaactaaggaccaagtctaaagagcagttagcatctcaattagtggatttgaagaaggaattggctgaattaaaggttcaaaagttgtccagaccatctttgcctaagatcaagactgtcagaaagtccattgcttgtgttcttacagtcatcaacgaacaacaaagagaagctgttagacaattgtacaagggtaagaagtaccaaccaaaggacttgcgtgctaagaagaccagagctttgagaagagccttgactaaatttgaagcctcacaagttactgaaaagcaaagaaagaaacaaattgccttcccacaacgtaaatacgctattaaggcttaa

SEQ ID NO: 4895 - DNA, 546 bp, Artificial Sequence
  Optimized genes for Saccharomyces cerevisiae
atgggtttatttgcctccaagttattctctaacttgttcggtaacaaggaaatgagaattttgatggtcggtctagatggtgctggtaagaccactgtactgtacaagttgaaattgggtgaagttattactaccatccctaccattggtttcaacgttgaaactgttcaatataaaaatatctctttcactgtctgggatgttggtggtcaagatcgtatcagatcattatggagacattactacagaaacaccgagggtgttatctttgttgtcgacagcaatgaccgttccagaatcggtgaggccagagaagtcatgcaaagaatgttgaacgaagatgaattgagaaatgctgcttggttggtgtttgctaacaaacaggacttgccagaagctatgtctgccgctgaaattactgaaaagctaggacttcactctattaggaacagaccatggttcattcaagctacttgtgcaacaagtggtgaaggcttgtacgaaggtttggaatggttatccaactctttgaagaactccacataa

SEQ ID NO: 4896 - DNA, 471 bp, Artificial Sequence
  Optimized genes for Saccharomyces cerevisiae
atgggtaaggacaataaagaacacaaggagagtaaagaatccaagaccgttgacaactacgaagctagaatgccagccgtcttgccattcgctaagccattggcttctaagaaattgaacaagaaggttttgaagactgttaagaaggcatcaaaggccaagaacgttaaacgtggtgtcaaggaagttgtcaaggctttgagaaagggtgaaaagggcttagttgttattgctggtgacatttctccagctgatgttatctcccacattccagtcctatgtgaagatcatagcgtgccttatattttcatcccttccaagcaagatttgggtgccgccggtgctaccaagagaccaacttctgtcgtctttatcgttccaggttctaacaaaaaaaaggatggtaaaaataaggaagaagaatacaaggaatctttcaacgaagtcgtaaaagaggttcaagctttataa

SEQ ID NO: 4897 - DNA, 1089 bp, Artificial Sequence
  Optimized genes for Saccharomyces cerevisiae
atgtctcgtccacaagttactgtccactctttgactggtgaagctaccgctaatgctttgccattacctgcagtgtttagtgccccaatcaggcccgatattgttcacaccgtcttcacttccgttaacaagaataagagacaagcttacgccgtttctgaaaaagctggtcatcaaaccagcgccgaatcttggggtaccggtagagctgttgccagaattccaagagtgggtggtggtggtactggccgttctggtcaaggtgctttcggtaacatgtgtcgtggtggcagaatgttcgcaccaactaaaacctggagaaagtggaacgtcaaagtcaaccacaacgaaaagcgttatgccaccgcatcggctattgctgctactgctgtcgcatccttagtactggctagaggtcacagagttgaaaaaattccagaaatcccattggttgtcagtactgatttggaatccattcaaaagactaaggaagccgtagcggcacttaaggctgttggtgctcattctgatttattgaaagttttgaaatctaagaaattaagagccggtaagggtaagtacagaaacagaagatggactcaaagacgtggacctctagttgtttacgctgaagacaacggtattgtcaaggccttgagaaatgttccaggtgtcgaaaccgccaacgttgcttccttgaatttgttgcaattggctccaggtgcccatttaggtagattcgttatctggaccgaagctgcctttacaaagttggaccaagtttggggttccgagactgttgcttcttccaaggtcggttacactttgccttcccacattatttctacatctgacgtcaccagaatcatcaattcatcagagatccaatctgctatcagaccagctggccaggccacacagaagagaactcatgtcttgaagaagaacccactaaagaacaagcaagtccttctaagattgaacccttatgctaaggttttcgctgctgagaaattgggttctaaaaaggctgaaaagaccgggacgaagccagccgctgtgtttgctgaaactttaaagcacgattaa

SEQ ID NO: 4898 - DNA, 597 bp, Artificial Sequence
  Optimized genes for Saccharomyces cerevisiae
atgccaagagttgccattattatctacactttatatggtcacgttgctgctactgctgaagctgaaaagaagggtattgaagctgccggtgggagtgctgacatttaccaagttgaagaaaccctttctccagaagttgtcaaggccctaggtggtgctccaaagccagattatcctatagccactcaagatactttgactgaatacgatgcttttttgtttggtatcccaaccagattcggtaacttcccagctcaatggaaggctttctgggacagaaccggcggtttatgggctaaaggtgccttgcacggtaaagtagcaggttgtttcgtgagcaccggtactggtggtggtaatgaggccacaatcatgaactctttgtccacattggctcatcatggaatcatctttgttccattgggttacaagaacgtttttgcagagctgaccaacatggacgaagtccatggtggctccccatggggtgctggtaccattgctggttccgatggttctcgttcaccttctgctttggaattacaggtccacgaaattcaaggtaagactttctacgaaactgtcgccaaattctaa

SEQ ID NO: 4899 - DNA, 963 bp, Artificial Sequence
  Optimized genes for Saccharomyces cerevisiae
atgtctacttttgaaactttaattaagagaggtggtaacgaggccatcaagatcaaccctcccaccggtgctgatttccacattacatcacgtggttctgactggttctggacttgtttctgttgttatctattatttggtttgattttgactttcttgatgtttagaaagccagtcaacgaccgttttttctacttgactggtattgcaccaaacttcttcatgtgcattgcatacttcaccatggcctctaacttgggatggatccctgtcaaggctaagtacaaccatgttcaaaccagtacccaaaaggaacatccaggttacagacaaatcttctactccagattcgtcggttggtttctagcgctgccatggccaatcattcagatctgtatgttggctggcaccccattttggcaaatggctttcaacgtttgtatcactgaattctttactgtctgttggttgatagctgcttgtgttcactccacttataaatggggttactacaccattggtcttggtgccgccattgttgtttccatttctgtcatgaccacttcttacaatcttgtaaagcaaagagacaacgatatcagattgacatttttggtcttcttctctattatcatgttcttatggattattgcctatcctacgtgcttcggtattactgatggtggtaatgtgttgcaaccagatagcgctggtatcttttacggtatcatcgatttgatcttaatgtgttttattccaactttgttggttccaattgctaaccacttcggcgctgacaagttggggtatcatttcggtccatccgatgctgaagctgttatggctccaaaggccccagttgcttctccaagaccagctgccacccctaatttatcgaaggacaaaaagaagaagtctaagaagtccaagaaatcaaagaaatccaaaaaatctgaagaataa

SEQ ID NO: 4900 - DNA, 747 bp, Artificial Sequence
  Optimized genes for Saccharomyces cerevisiae
atggctagaactttctttgtgggtggtaacttcaagttaaacggttccaagcaatctattaaggaaattgttgaacgtttgaacaccgccagtattcctgaaaacgtcgaagtcgtcatctgtccaccagctacttacttggactactccgtttccttggtcaagaaacctcaagttactgttggtgctcaaaacgcatatcttaaagccagcggcgctttcactggtgaaaattctgttgaccaaatcaaggatgttggtgccaaatgggttatcctgggccattccgagagaagatcttacttccacgaagatgacaagttcattgctgataagaccaagtttgctttaggtcaaggtgtcggtgttattttatgtatcggtgaaactttggaagaaaagaaggctggtaagacactagatgtcgtggaaagacaattgaatgctgttttagaggaagttaaagactggaccaacgttgtcgttgcttatgaaccagtctgggctattggtaccggtttggctgccactccagaagacgctcaggatattcacgcttctatcagaaagtttttggcctctaaattgggtgacaaggctgcttcggagctacgtattttgtacggtggttcagccaatggttctaacgccgtcacctttaaggacaaagctgacgttgatggtttcttggttggaggggcatctttgaagccagaattcgtagatatcatcaactccagaaactaa

SEQ ID NO: 4901 - DNA, 456 bp, Artificial Sequence
  Optimized genes for Saccharomyces cerevisiae
atgggtagaatgcattctgctggtaagggtatttccagttcagccatcccatactctcgtaatgccccagcttggttcaagttgtcttctgaatccgttattgaacaaattgtcaaatatgccagaaaaggcttaacaccatctcaaatcggtgttttgttgagagacgctcacggtgtcacccaagctagagttatcactggtaacaagatcatgcgtattttgaagagcaatggtttggctccagaaattcctgaagatctttactacttaatcaagaaggctgtctcggtgaggaaacatttggaaagaaacagaaaggacaaggatgctaaatttagattgatcttgattgagtccagaattcacagactagcacgttattacagaactgttgctgttttacctccaaactggaagtacgaatctgccaccgcatccgctttggtcaactaa

SEQ ID NO: 4902 - DNA, 1017 bp, Artificial Sequence
  Optimized genes for Saccharomyces cerevisiae
atgaagttgtctactgttttgttgtccgctggtttagccagcactactttggctcaattttccaactccactagtgcttcctcgactgatgttacttcttccagctctatttctacttcctctggttctgttaccatcacttcctctgaagctccagaaagtgacaacggaacctcaaccgctgctccaactgaaacttctaccgaggcgcccaccactgctattccaactaacggtacttcgactgaagcccctaccactgccatcccaactaatggtactagtaccgaagcaccaactgacactaccactgaagctccgaccaccgccctgcccacaaacggtacctccactgaggctccaaccgacaccaccacagaggccccaactactggtttgccaaccaacggcacaacctctgctttcccacctaccacatctttgcctccatctaacactaccaccactccaccatacaacccatccacagattacactaccgattatactgtggtcaccgaatacacaacttattgtccagaacctactaccttcaccaccaatggtaagacctacaccgttactgaaccaacaaccttgactattactgactgtccttgtactatcgaaaaaccaacaacaacgtcaactactgaatatacagtagtgactgaatacaccacttactgtccagaaccaacgactttcactaccaacggtaaaacttacactgtcactgagccaaccactttaaccattaccgattgcccatgtaccattgaaaagtccgaagctcctgaatcctccgtccctgttacagaatctaagggtacaacgaccaaggaaaccggtgtcactactaagcaaactacagcaaatccatcacttaccgtcagcactgttgttccagtttcttcttcagcttcttctcactctgtcgttatcaactctaatggcgccaacgttgtcgtcccaggtgctttgggtctagccggtgttgctatgttgtttttataa

SEQ ID NO: 4903 - DNA, 489 bp, Artificial Sequence
  Optimized genes for Saccharomyces cerevisiae
atgtcccaagtttactttgatgttgaagctgacggtcaaccaattggtagagttgtatttaaattgtacaacgacattgttccaaagactgctgaaaacttcagagctttgtgtactggtgaaaagggtttcggttacgccggctctccattccacagagtcattcctgatttcatgttgcaaggtggtgacttcactgccggtaacggtaccggtggtaaaagtatttacggtggcaaattcccagacgaaaatttcaagaagcaccatgacagaccaggtctattatccatggctaacgcaggtccaaacaccaatggttctcaatttttcatcactacagtcccatgtccatggttggatggtaagcatgttgtctttggagaggtggttgatgggtatgatatcgtcaagaaggtcgaatctttgggttcaccttccggtgctaccaaggctcgtatcgttgttgccaagtctggtgaattataa

SEQ ID NO: 4904 - DNA, 648 bp, Artificial Sequence
  Optimized genes for Saccharomyces cerevisiae
atgtctagagctaagagaatcatgaaggaaattcaagctgtcaaggatgacccagctgctcacatcactttggaatttgtttctgaatctgacattcaccacttgaagggcactttcttgggtcctccaggtactccatacgaaggtggtaagttcgttgttgacatcgaagtcccaatggaatacccattcaagccaccaaagatgcaatttgacaccaaggtttatcatcccaatatctcctctgtaactggtgctatctgtttggatattctgaagaatgcttggtcccctgtgatcaccctaaaaagtgcactaatttcattacaggccttacttcaatctccagaaccaaatgatcctcaagatgctgaagttgctcaacattacttgcgtgacagggagtctttcaacaagaccgccgccttatggaccagattgtatgcttctgagacatccaacggtcaaaagggtaacgtcgaagagagcgatttgtacggtatcgatcatgacttgattgatgaattcgaatcccaaggttttgaaaaagacaagattgttgaagttttgagaagattaggagtcaaatctttggatccaaacgacaacaacactgccaacagaattattgaagaattgttgaaataa

SEQ ID NO: 4905 - DNA, 546 bp, Artificial Sequence
  Optimized genes for Saccharomyces cerevisiae
atgatgttgccaagatctatgaagttcatgactggcaggcgtatcttccacactgctactgttagagctttccaatccacagccaagaagtcattgaccattccatttttgcccgtgttgcctcaaaagccaggtggtgtaagaggtactccaaacgacgcttacgttcctccaccagaaaacaaattagaaggttcctatcattggtacatggagaagatctttgctttgagcgtcgttccattggcaacaaccgccatgctgaccactggtccactaagtaccgctgctgattctttcttctctgttatgttactaggttactgttacatggaattcaactcttgtatcaccgattatatttctgaaagagtctacggtgtctggcacaagtacgctatgtatatgcttggattgggttctgccgtctcgttatttggtatttacaagttggaaactgaaaatgatggtgttgttggtttggtcaagtctttgtgggactcctccgaaaaggacaactcccaaaaaattgaagctaagaaataa

SEQ ID NO: 4906 - DNA, 396 bp, Artificial Sequence
  Optimized genes for Saccharomyces cerevisiae
atgtctgccaaggctgaaaagaagcctgccagcaaagctccagccgagaaaaagccagctgctaaaaagacttctacgtcaacagatggtaagaagcgttccaaggccagaaaggaaacttatagttcgtatatctacaaggttttgaagcaaactcatccagacactggtatctctcaaaagtccatgtccattttgaactctttcgtcaatgatatctttgaaagaattgctactgaagcttccaaattagcagcttacaacaagaaatccaccatttctgctagagaaattcaaaccgccgttagattgatcttgccaggtgaactagcaaagcacgctgtttctgaaggtaccagagctgtcaccaagtactcttcttccactcaagcttaa

SEQ ID NO: 4907 - DNA, 399 bp, Artificial Sequence
  Optimized genes for Saccharomyces cerevisiae
atgtctggtggtaagggtggcaaagcaggttctgctgccaaggcttcacagtcccgtagcgcaaaagctggtttgactttcccagttggtagagttcacagattgttgagaagaggtaactacgctcaaagaattggttccggtgctcctgtgtatcttaccgctgtcctggagtacttggctgctgaaatcttggaactagccggaaatgctgctagagacaacaaaaagaccagaatcatcccaagacatttgcaattggccattcgtaacgatgatgaattgaacaagttattgggtaatgttactattgcccaaggtggtgtcttgccaaacattcaccaaaacttgttaccaaagaagagtgctaaggctacaaaggcctctcaagaattataa

SEQ ID NO: 4908 - DNA, 669 bp, Artificial Sequence
  Optimized genes for Saccharomyces cerevisiae
atgtcttcctctgaatccatcagaatggttttaattggtccaccaggtgctggtaaaggaactcaagctccaaacttgcaagaaagattccatgctgctcacttggcaaccggtgacatgttgagatcccaaattgccaagggtacccaattgggcttagaggctaagaagattatggatcaaggtggtttggttagcgatgatatcatggtcaacatgattaaagacgaattgaccaacaacccagcttgtaagaacggttttatcttggacggtttcccaagaaccattccacaggctgaaaagctagaccaaatgcttaaagaacaaggcactccattggaaaaagctattgaattaaaggttgacgatgagctattagttgctagaatcacaggtagattgatccatcctgcctctggtcgtagttaccacaagatctttaatcctccaaaggaagatatgaaggacgatgtcactggtgaagccttagtgcaaagatcagacgacaatgctgacgctttgaagaaacgtctggccgcatatcacgctcaaactgaaccaattgtagatttctacaagaagactggtatctgggccggtgttgatgcttctcaaccacctgccacagtctgggctgatattttgaacaagttgggtaaggattaa

SEQ ID NO: 4909 - DNA, 888 bp, Artificial Sequence
  Optimized genes for Saccharomyces cerevisiae
atgtctgcttccgcgcaacactctcaagcccaacaacaacagcaacaaaagtcttgcaactgtgatttgctattatggagaaacccagtccaaactggtaagtactttggtggttccttgttggctttactaatacttaagaaggttaacttgatcacttttttcttgaaagtggcctataccatcttattcaccactggttctattgaatttgtcagtaaattatttttgggtcaaggtttgattaccaaatacggtccaaaggaatgtccaaacattgctggtttcatcaagccacacattgacgaagctttgaagcaattgccagttttccaagctcacatcagaaagactgtttttgcccaggtacccaagcatactttcaagaccgctgttgccctatttcttttgcacaagttcttctcttggttctccatctggactattgtcttcgtcgctgacattttcacattcactttgcctgtcatctatcattcttacaagcacgaaattgatgctaccgttgctcaaggtgttgaaatctcgaaacagaagactcaagagttttcccaaatggcttgtgaaaaaactaaaccatacttggacaaggtcgaatctaagttgggcccaatttctaatttagtcaagtccaagacagctccagtgtcaagtacagcaggacctcaaaccgcctctacttctaaattggccgctgatgttccattggagcctgaatccaaggcttacacttcaagcgcacaagttatgccagaagttccacaacatgaaccatctacgacccaagaattcaacgttgatgaactgtcaaatgaattaaagaaatccaccaagaatttgcaaaacgaattggaaaagaacaacgcttaa

SEQ ID NO: 4910 - DNA, 168 bp, Artificial Sequence
  Optimized genes for Saccharomyces cerevisiae
atggactctgccaagatcatcaacattattctatccttattcttgccacctgttgctgtctttttggccagaggttggggtactgactgtatcgtcgatatcattttaaccattttggcttggttcccaggtatgttgtatgctttgtacattgttttgcaagattaa

SEQ ID NO: 4911 - DNA, 291 bp, Artificial Sequence
  Optimized genes for Saccharomyces cerevisiae
atgtctactgttaatgttttgagatactccgcattaggtttgggtttatttttcggtttcagaaacgatatgattttgaagtgtaacgccaagaagaaggaagaacaagctcaatacgaagaaaagctaaaattggtcgaggaagctaaaaaggaatatgctaagttgcaccctgtggtcaccccaaaggatgttccagctaatgcttctttcaacttggaagacccaaacattgactttgaacgtgtcatcttgaacgctgttgaatctttgaaagaggcctccacttaa

SEQ ID NO: 4912 - DNA, 1824 bp, Artificial Sequence
  Optimized genes for Saccharomyces cerevisiae
atggcttctactgccaatatgatttcccaattgaagaaactcagcatcgctgaaccagccgttgctaaggactctcatccagacgtcaatattgttgacttgatgagaaactacatttctcaagaattgtccaagattagcggtgttgattcgtctttgatcttcccagctttggaatggactaacaccatggaaagaggtgatctattaatacctattccaagactacgtatcaagggtgctaacccaaaggacttggctgtccaatgggctgaaaaattcccatgtggtgattttttagaaaaagtcgaagctaatggcccatttattcaattcttctttaatcctcagttcttggcaaaattagtcatcccagatattctgacaagaaaggaagactacggttcctgtaaattggttgaaaataagaaggtcattattgaattctcttctccaaacattgcaaagccattccacgctggtcatttgaggagtaccatcatcggtggtttcttggccaacttgtatgaaaaattgggttgggaagttatcagaatgaactatctaggtgactggggtaagcaatttggtttattagcagtcggtttcgaacgttatggtaacgaagaggccttggtgaaggatccaattcatcacttgtttgatgtttacgtcagaatcaacaaggatatcgaagaagaaggtgattccattccattggaacaatccaccaacggaaaggccagagaatacttcaagagaatggaagatggtgacgaagaagccttaaagatctggaagagattcagagaattctccatcgagaaatacatcgatacttacgccagattgaacatcaagtacgacgtttattctggtgaatctcaagtttctaaggagtccatgttgaaggctattgaccttttcaaagaaaagggtctaactcacgaagacaagggcgctgttttgattgatttgaccaagttcaacaaaaagttaggtaaggctatcgttcaaaagtctgacggtactactttgtacttaacaagagatgttggtgcagctatggacagatatgagaagtaccatttcgataaaatgatctacgttattgctagtcaacaagacctacatgctgctcaattttttgaaattttgaaacaaatgggttttgaatgggctaaagatctgcagcacgtcaacttcggtatggttcaaggtatgtctaccagaaagggcactgttgtttttttggacaacatcttggaggaaactaaggaaaagatgcacgaagtcatgaagaagaatgaaaacaagtatgcccaaattgaacacccagaagaagtcgctgatttggtcgggatatcagcggttatgatccaagatatgcaaggtaaaaggattaacaactacgaatttaaatgggaaagaatgctttctttcgaaggagacactggtccatacttgcaatacgctcactctcgtcttagatctgttgaaagaaacgcctccggtattactcaagagaagtggattaatgctgacttctcattgttgaaggaacctgctgccaagttgttaatccgccttctgggccagtacccagacgtattgagaaatgccattaagactcatgagcccaccaccgttgtgacgtatttgttcaagttgacacaccaagtctcatcctgctacgatgtcttatgggttgccggtcaaaccgaagaattagctactgctagattggctttgtacggtgctgctagacaagtattatacaacggtatgcgtctattgggtttgacccctgtggagcgtatgtaa

SEQ ID NO: 4913 - DNA, 1713 bp, Artificial Sequence
  Optimized genes for Saccharomyces cerevisiae
atgtcccaagacgctgctattgcagaacaaacacctgtggaacatttgtcagcagttgactctgcttctcattctgtcttgtctactccttccaacaaggctgagagagatgaaatcaaggcttacggtgaaggtgaggaacacgaaccagttgttgaaattccaaagagaccagcttcggcctatgtcactgtttctatcatgtgtatcatgattgctttcggtggtttcgtctttggttgggatactggaaccatctccggttttatcaaccaaactgatttcattagaagattcggtatgaagcacaaggatggtaccaactatctttctaaggtcagaaccggtttgattgtaagcattttcaacatcggctgtgctatcggtggtattattttgagcaaattaggtgatatgtatggcagaaaggttggactcatagtcgttgttgttatttacattattggtattatcattcaaatcgcatcaattaacaaatggtaccaatacttcatcggtcgtatcatctctggtttaggtgtcggcggaattgccgttttatctccaatgttgatcagtgaagtttcacccaagcatttaagaggtactttggtgtcgtgctaccagttgatgattactgccggtatcttcttgggttactgtactaacttcggcaccaagaactactctaattctgttcaatggagagttcctttgggtctatgttttgcttgggctttgtttatgattggtggtatgacgtttgtcccagaatctccaagatacttggccgaggtgggtaagattgaagaagctaagaggagtatcgctgtttccaataaagttgctgtcgacgacccgagtgttctagctgaagtcgaggcggtactggcaggtgttgaagccgaaaagttggctggtaatgcttcctggggtgaattgttctcttccaagaccaaagtcttgcaaagattgattatgggtgccatgatccagtccttacaacaattgactggtgacaattatttcttttactatggtaccaccattttcaaggccgtcgggttatctgacagctttgaaacttccattgttcttggcattgtcaactttgcctccactttcgttggtatctacgtcgtcgaaagatatggtagaagaacttgtttgttgtggggtgccgcttccatgaccgcttgtatggttgtctacgcttccgttggtgttacacgtctatggccaaacggtcaagatcaaccatcttcaaaaggtgctggtaactgtatgatcgttttcgcctgtttctacatcttttgctttgcaactacctgggctccaatcccatacgttgtagtgtctgaaaccttcccattgagagtcaagtctaaagctatgtctattgctactgctgccaactggttatggggtttcttaatagggtttttcactccattcatcactggtgccattaatttctactacggttatgtcttcatgggttgtctggttttcatgttcttctatgtgctattggttgtccctgaaacaaagggtttgaccttggaagaggttaacaccatgtgggaagaaggtgtattgccatggaagtccgcttcttgggttccaccatcccgtcgtggtgctaactacgatgctgaagaaatgactcacgatgacaagccattgtacaagagaatgttttctacaaaataa

SEQ ID NO: 4914 - DNA, 1713 bp, Artificial Sequence
  Optimized genes for Saccharomyces cerevisiae
atgtctcaggacgctgccattgcagaacaaacccctgttgaacacctaagcgccgttgattccgcttcacatagtgtattgtccactccttccaacaaggccgaacgtgatgaaatcaaggcttacggtgaaggtgaggaacatgaaccagttgtagaaattcctaaaagaccagctagcgcttatgttactgtttctatcatgtgtatcatgattgcctttggtggtttcgtctttggttgggatactggtactatcagtgggttcatcaaccaaactgatttcatcagaagattcggtatgaagcacaaggatggtacaaattacttgagcaaagtcagaactggcttaattgtctccatattcaacatcggttgtgctattggtggtattattttgtctaaattgggtgatatgtacggaagaaaggtcggtctaatcgtcgtagtcgtcatctacattataggaatcatcattcaaatcgcctcaatcaataaatggtaccaatacttcattggtagaatcatttccggcttaggtgttggcggtattgccgtcctttctccaatgttgatttctgaagtttccccaaagcatttgcgtggcacgttggtctcttgttatcagttgatgatcacagcaggtatctttttgggctactgtaccaacttcggtacaaagaactattctaactctgtccaatggagagttccccttggtctgtgctttgcttgggctttattcatgattggtggtatgacttttgttccagaatctccaagatacttagcagaggtgggtaagattgaagaggctaagagatctattgccgtgtccaacaaagttgctgttgacgacccatcggttttagctgaagttgaagctgtacttgccggggtggaagctgaaaagttggccggtaatgcttcttggggtgaattgttctcctctaagaccaaggttctccaaagattgattatgggtgccatgatccaatctttgcaacaattgactggtgacaactactttttctattatggtaccaccattttcaaggcagttggtttgtctgactctttcgaaacctcaattgttttgggtatcgttaatttcgctagtacctttgtcggtatttacgttgtcgaaagatatggtaggcgtacttgtttgttgtggggtgctgcatccatgaccgcttgtatggttgtctacgcttctgttggtgttaccagactatggccaaacggtcaagaccaaccatcctcaaaaggtgctggtaactgtatgatcgtgttcgcctgtttctacatcttctgttttgccactacctgggctccaattccatacgtcgttgtttcggagactttcccattacgtgtcaagtccaaggctatgtccattgctactgctgctaactggttatggggtttcttgatcggattcttcactccattcattaccggtgcgattaacttttactacggttacgtttttatgggttgcttggttttcatgtttttttatgtcctgctagttgtgcctgaaactaagggtttaactttggaagaagtcaacaccatgtgggaagaaggtgtcttgccatggaagtctgcttcctgggttcctccatctagaagaggtgccaattatgatgctgaagaaatggctcacgatgacaagccattgtacaagagaatgttctctacaaaataa

SEQ ID NO: 4915 - DNA, 333 bp, Artificial Sequence
  Optimized genes for Saccharomyces cerevisiae
atgaaatatttggctgcttacctgctattagtccaaggtggaaatgctgctccaagtgccgctgatatcaaggctgtggttgaatctgtcggtgctgaagttgacgaagccagaatcaacgaattgttgtcctcattagaaggtaagggttctttggaagaaattattgctgaaggtcaaaagaagttcgctactgttccaaccggtggtgcttcttctgctgccgcaggcgcagccggtgccgccgctggtggtgacgctgccgaggaggaaaaggaagaagaagctaaagaagaatccgatgatgacatgggtttcggtttgtttgattaa

SEQ ID NO: 4916 - DNA, 498 bp, Artificial Sequence
  Optimized genes for Saccharomyces cerevisiae
atgccacctaaattcgacccaaacgaagtcaaatatctatacttgagagctgttggtggtgaagttggtgcttctgctgctttggctccaaagattggtccattgggtttgtctcccaagaaggtcggtgaagatattgctaaggctactaaggaatttaagggtatcaaggttactgttcaattgaagatccaaaacagacaagctgccgcaagtgtagttccatctgcctcatccttagttatcaccgcactgaaagaaccaccaagagatagaaagaaagataaaaatgtcaagcattctggtaacattcagttagacgaaatcatcgagattgcccgtcaaatgagagacaagtctttcggtagaactttggcctccgtcaccaaggaaattcttggcacagctcaatccgtgggttgtcgtgttgacttcaagaaccctcacgatatcattgaaggtattaatgctggtgagatcgaaattccagaaaactaa

SEQ ID NO: 4917 - DNA, 564 bp, Artificial Sequence
  Optimized genes for Saccharomyces cerevisiae
atgtctaggccaattgttatctcaggcccttcaggtaccggtaagtctactttgttgaagaagctttttgccgagtatcctgattctttcggtttctccgtttcttctaccaccagaactccaagagctggtgaagttaacggtaaggactacaactttgtcagcgtagatgaattcaagtccatgatcaagaacaacgaatttattgaatgggctcaattttccggtaactactacggttccactgttgcttctgtgaagcaagtttccaagtcgggaaaaacatgtatcttggacattgacatgcaaggtgttaaatctgtcaaggctattccagaattaaatgccagattcttgttcatcgctccaccatctgttgaagatttgaaaaagcgtttggaaggtagaggtactgaaaccgaagaatctatcaacaagagattaagtgcagcccaagctgaattggcttacgctgaaactggtgctcacgacaaggtcattgtcaatgatgacttggataaagcatataaggaactaaaggatttcattttcgccgagaaataa

SEQ ID NO: 4918 - DNA, 411 bp, Artificial Sequence
  Optimized genes for Saccharomyces cerevisiae
atggctaaattcttgaaggctggtaaagttgctgttgttgtcagaggtcgttatgcgggcaagaaggtcgtcattgttaagcctcatgatgaaggttccaaaagccatccattcggtcacgctttggttgccggtattgaacgttacccatcaaaggttaccaagaagcacggtgctaagaaagtcgccaagagaactaagatcaagccatttatcaaagtggtaaattacaaccatttactaccaaccagatacactttggacgttgaagctttcaagtctgttgtttctactgaaacatttgaacaaccatctcaaagagaagaggcaaaaaaagtcgtcaagaaggccttcgaagaaagacaccaagctggtaagaaccaatggttcttttccaagttgagattctaa

SEQ ID NO: 4919 - DNA, 1755 bp, Artificial Sequence
  Optimized genes for Saccharomyces cerevisiae
atgggtatccacattccatacttgacttccaagacctcccagtccaacgtcggggacgccgtgggtaacgctgactctgttgaattcaactctgaacacgattccccatctaaaagaggtaaaattacattggaatctcatgaaatccaaagagctccagcttctgatgacgaagatagaattcaaatcaagccagttaacgatgaagatgatacgtcagtcatgattacttttaatcaatctttatctccattcatcattaccctgacatttgtcgcatctatctctggtttcatgtttggttacgacaccggttatatctcctctgctcttatatcaattggcaccgatttggaccacaaggttttaacttacggtgaaaaggaaattgtcactgctgccacatccttgggtgcattaatcactagcatcttcgctggcaccgctgctgatatttttggtagaaagagatgtttgatgggttctaacttgatgttcgttattggtgctatccttcaagtcagtgctcatactttctggcaaatggctgttggcagattgatcatgggtttcggtgtcggtattgggtctttgattgcacctctctttatcagcgagattgctccaaagatgatccgtggtcgtttaaccgtcatcaactccctatggttgactggtggtcaattggtagcgtatggttgtggtgctggtctgaattatgtcaacaacggttggagaatcttggttggtttgtcactaatccccactgccgtccaatttacgtgtttgtgtttcttacctgacactccaagatactacgttatgaagggtgacttggctagagctactgaagtcttgaaaaggtcgtacactgatacaagcgaagaaattatcgaaagaaaggtcgaagagctagtaaccttgaaccaatccatccctggtaagaacgttcctgaaaaagtctggaacactattaaagagttgcataccgttccatccaatttacgtgctttgataattggttgcggtttacaagctattcaacaattcaccggctggaatagtttaatgtacttctccggtaccatctttgaaactgttggtttcaagaattcatcagccgtgtcgattattgtttctggtactaacttcatcttcactttggttgcattcttctctattgacaagatcggtagaagaactatccttttaattggtttgccaggtatgactatggccttggtcgtttgttctattgccttccacttcttgggaatcaaattcgacggtgccgttgctgtggttgtttcctccggattttcttcttggggtatcgttatcattgttttcattatagtgtttgccgctttctatgctttgggtattggcactgtcccatggcaacagtctgaattgttcccacaaaatgttagaggtattggtacttcttacgctaccgccaccaactgggctggtagtctagtcattgcttccactttcttgaccatgttgcaaaacatcaccccagccggtacctttgctttctttgcaggtttgtcctgcttgtctacaattttctgttatttttgttacccagaattaagtggattggagttggaagaagttcaaaccattttgaaggatggttttaacattaaggcctctaaggctttagctaagaagcgtaagcaacaagttgccagagttcacgaactaaaatacgaaccaactcaagaaatcattgaagacatttaa

SEQ ID NO: 4920 - DNA, 267 bp, Artificial Sequence
  Optimized genes for Saccharomyces cerevisiae
atgggtaaaggtactccatctttcggtaagagacataacaagagtcatactttatgtaacagatgcggccgtcgttcatttcatgtccaaaagaagacttgttcttcttgtggttacccatccgccaagaccagatctcacaactgggctgcaaaagccaaaagaagacacaccacaggtaccggtagaatgagatatttgaagcacgtttccagaagattcaagaatggtttccaaactggttctgctaaggctacttccgcttaa

SEQ ID NO: 4921 - DNA, 384 bp, Artificial Sequence
  Optimized genes for Saccharomyces cerevisiae
atgccacagtctttcacttccattgccagaattggtgactacatcttgaaatctccagttttgtccaagttatgtgttcctgtcgccaaccaatttatcaacttggctggttacaagaagttgggtttgaagttcgatgatttgattgctgaagaaaacccaattatgcaaactgctttgagaagattgccagaagacgagtcatatgcacgtgcttacagaatcatcagagctcaccaaaccgaattgacccaccatctgctaccaagaaacgaatggatcaaggctcaagaagatgttccatacttacttccttatattttggaagctgaggccgctgccaaggaaaaggatgaattagacaatattgaagtctctaaataa

SEQ ID NO: 4922 - DNA, 846 bp, Artificial Sequence
  Optimized genes for Saccharomyces cerevisiae
atgtctgaataccaaccatccctattcgctttgaacccaatgggtttctctccattggacggcagcaaaagcaccaacgagaatgtgtccgcttctacctcaacggctaagcctatggttggtcaattgattttcgataaatttattaagaccgaggaagatccaatcatcaagcaagataccccctcaaatttagactttgacttcgcattgccacaaactgctactgctccagatgccaagactgttttgcctatcccagaattggacgacgctgttgtcgaatctttcttctcctcaagtacagactctacaccaatgttcgaatacgaaaatctggaagacaactccaaggaatggacttccctgtttgataatgatattccagttaccactgatgatgtctctttggctgacaaagccatcgaatccactgaagaagtctccttggttccatctaacttagaagtgtctactacctcgtttttaccaactccagtacttgaggatgctaaattgactcaaaccagaaaggtcaagaagccaaactctgtcgttaagaagtctcatcacgttggtaaggatgacgaaagtcgtttggatcatttgggtgttgttgcctataacagaaaacaaagatctattcctttgtccccaattgtccctgagtcttctgacccagctgccctaaagagagccagaaacactgaagctgctagaagatccagggcaagaaagttgcaaagaatgaagcagttagaagacaaggttgaagaattattgtctaagaactaccacttggaaaacgaagttgctagattgaagaaattagtcggtgaacgttaa

SEQ ID NO: 4923 - DNA, 132 bp, Artificial Sequence
  Optimized genes for Saccharomyces cerevisiae
atgttgatgtctactttgccaggtggtgttattttggttttcatcttagtcggtttggcttgtattgccattatttccaccatcatctacagaaagtggcaagctagacaaagaggtctacaacgtttttaa

SEQ ID NO: 4924 - DNA, 648 bp, Artificial Sequence
  Optimized genes for Saccharomyces cerevisiae
atgttgggtattcgttcatcggtcaagacttgtttcaagccaatgtccttgacttccaagagattaatctctcagtctttgttggccagtaaatctacctacagaactccaaacttcgatgatgttttgaaggaaaacaacgatgctgacaaaggtagatcttacgcttacttcatggttggtgccatgggtttgctatcctctgccggtgctaaaagcacagtagaaacttttatttcctccatgactgctaccgcagacgtcctagctatggctaaggtcgaagttaacttggctgctatcccattgggcaagaacgtcgtcgtgaaatggcaaggtaagcctgttttcatcagacacagaacccctcacgaaattcaagaagccaattctgttgacatgtctgctttaaaggacccacaaactgacgcagacagagttaaggatcctcaatggttgatcatgcttggaatctgtacccatttgggttgtgttccaattggtgaagctggtgattttggtggttggttctgcccatgtcacggttctcattacgatatttctggtcgtatcagaaagggtccagctccattaaatctggagattccagcctatgaatttgatggtgacaaggttattgtcggctaa

SEQ ID NO: 4925 - DNA, 483 bp, Artificial Sequence
  Optimized genes for Saccharomyces cerevisiae
atgactgaattgtgtcctgtatatgctccattcttcggtgctatcggttgtgcatcagccatcatcttcactagcttaggtgctgcttacggtactgctaaatccggtgtcggtatctgtgccacctgtgttttgagaccagatttgttgttcaagaacattgtcccagttatcatggctggtattattgccatttacggtttggttgtttccgtcttggtctgctactctttaggtcaaaagcaagctttgtacaccggtttcattcaattgggtgccggcttgtccgtgggattatctggtttggctgccggttttgctattggtattgttggtgacgctggtgttagaggttcttctcaacaaccaagattgtttgtcggtatgattttgatcttgatttttgctgaagttcttggcctatatggtttaatcgttgctttactgctaaatagtcgtgcaacacaggatgttgtctgttaa

SEQ ID NO: 4926 - DNA, 474 bp, Artificial Sequence
  Optimized genes for Saccharomyces cerevisiae
atgtccgatgaagagcatacatttgaaaccgctgatgctggttcttctgccacttatccaatgcaatgttctgctttgagaaagaacggttttgttgttatcaaatcaagaccatgtaaaattgtcgacatgtctacctccaagaccggtaagcacggtcacgctaaagtccatctagtggccattgacattttcactggtaagaagttggaagatttaagtccttccactcacaatatggaagttccagtcgtcaagagaaacgaataccaattgttggacatcgatgatggtttcttgtccttaatgaacatggacggtgacaccaaggacgatgttaaggctccagaaggcgagctgggtgattctttgcaaactgctttcgacgaaggtaaagacttgatggttactatcatcagcgccatgggtgaagaagccgcaatttctttcaaggaagctgctcgtactgattaa

SEQ ID NO: 4927 - DNA, 498 bp, Artificial Sequence
  Optimized genes for Saccharomyces cerevisiae
atgccaccaaagttcgacccaaacgaagtcaagtacctatatttgagagctgttggaggcgaagttggtgcttcagctgctttggctccaaaaattggtccattgggtttgtctccaaagaaggtcggtgaagatattgctaaggctaccaaagaattcaagggtattaaggttactgttcaattgaagattcaaaacagacaggccgctgccagcgtagttccatccgcctccagtcttgtgatcacagcactgaaagagcctccaagagatcgtaagaaagataaaaatgttaagcactctggtaacatccaattagacgaaattatcgagattgccagacaaatgagagacaagtctttcggtagaactttggcatccgtcaccaaggaaatcttaggtactgctcaatctgttggttgtcgtgtcgattttaagaaccctcatgacatcattgaaggtatcaatgctggtgaaatcgaaattccagaaaactaa

SEQ ID NO: 4928 - DNA, 765 bp, Artificial Sequence
  Optimized genes for Saccharomyces cerevisiae
atggcttacaccaagattgctttatttgccgctatcgctgcactggcatctgctcaaactcaagaccaaatcaacgaattgaacgttatcctaaacgatgtcaagtcccacttgcaagaatacatttccctagcttctgactcttcatctggtttctctttgtcctccatgccagccggtgtcttggacattggtatggccttggcttctgctactgatgattcttataccactttgtactctgaagttgacttcgctggcgtgtccaagatgttgaccatggttccatggtactcctccagattggaaccagctttgaagtctttaaacggtgatgcttccagctctgcagctccctcgtcctctgctgctccaacatcctctgctgctccatcttccagcgccgcaccaacctcatcagcagccagttcaagctctgaggccaagtcttcgtcagccgctccatcttccagtgaagccaaatcttcttctgccgcgcctagttcgtccgaagctaaatcttcttccgctgctccatcctcttctgaggctaagagctcaagtgctgctccttcctccactgaagctaagatcacttccgccgccccaagttctactggtgccaagacttctgccatttctcagatcaccgatggtcaaattcaagctacaaaggctgtctctgaacaaaccgaaaatggagcggccaaagctttcgtcggtatgggtgctggtgttgttgctgctgctgctatgcttttataa

SEQ ID NO: 4929 - DNA, 366 bp, Artificial Sequence
  Optimized genes for Saccharomyces cerevisiae
atggctcaaagagttactttcagaagaagaaacccatacaacaccagatctaacaagatcaaggttgttaagaccccaggtggtatcttacgtgcacagcatgtcaagaagttggctactagacctaaatgcggtgactgtggttctgctttgcaaggtatttccactttgagaccaagacaatatgctaccgtttccaagacacacaagactgtttcaagggcttacggtggcagtcgttgtgccaattgtgtcaaggaaagaattatcagagcctttctaattgaagaacaaaagattgtcaaaaaggtcgtgaaagagcaaactgaagctgccaagaagtctgaaaagaaggctaagaaataa

SEQ ID NO: 4930 - DNA, 408 bp, Artificial Sequence
  Optimized genes for Saccharomyces cerevisiae
atgtctgatgctgtcaccattcgtaccagaaaggttatttccaacccattgttggctcgtaagcaattcgttgtcgatgtcctacaccctaatagggctaatgtttctaaagacgaattgagagaaaagttggctgaagtttacaaggccgaaaaggacgctgtttccgttttcggtttcagaactcaatttggtggtggtaaatcagtgggttttggccttgtatacaactctgttgccgaggccaagaaattcgaaccaacttatcgtttagtcagatacggtttggcagaaaaagttgaaaaggctagtagacaacaaagaaaacaaaagaagaacagagacaagaagatcttcggtactggtaagagattagctaagaaggtcgccagaagaaacgctgattaa

SEQ ID NO: 4931 - DNA, 2304 bp, Artificial Sequence
  Optimized genes for Saccharomyces cerevisiae
atggttcaatctgctgttttgggttttccaagaattggtccaaacagagaattaaagaaagctaccgaaggttactggaacggaaagattactgtcgacgaattgttcaaggttggtaaagacttgagaactcaaaactggaaattacaaaaggaagctggtgtcgacattattccatccaatgacttctccttttatgatcaagtcttagacctgagtctgctattcaacgttatcccagatagatacactaagtacgatttgtctccaattgatactttgtttgccatgggtcgtggtttgcaaagaaaggccacggagactgaaaaagccgttgacgttactgctttagaaatggttaaatggttcgactccaactaccattatgtcagacctactttctcaaagactactcaattcaagttgaatggtcaaaaacctgttgatgaattcttggaagctaaggaattgggtatccataccagaccagttttattgggccccgtgtcgtatttattcttaggtaaggctgacaaggactctttggatttggaaccattgtcacttttggagcaattgttgccattgtacacagaaattttaagcaagttagcttctgctggtgctactgaagtccaaattgacgaacctgtcttggttttggaccttcctgccaatgctcaagctgctataaagaaggcttacacttacttcggtgagcagtctaacttgccaaagatcaccttggccacctactttggtaccgtcgttccaaatctagatgctatcaagggtttgccagtggcagcattgcatgtcgattttgttcgtgccccagaacaatttgatgaagttgtcgccgccatcggtaacaagcaaaccttgtccgtcggtattgttgatggtagaaacatctggaagaacgatttcaaaaaatcttctgccattgtcaataaggctattgaaaagctaggggcagacagagtggtagtcgcaacatcgtcttccctattgcacactccagtagatttgaacaacgaaaccaaattggacgccgaaatcaagggtttcttttcatttgctacccagaagttggatgaagttgttgttattaccaagaatgtttctggtcaagatgttgctgctgctctagaagccaacgccaagtccgttgaatctagaggtaagtctaaatttatccacgatgccgctgtcaaggctagagtcgctagcatcgatgaaaagatgtctactagagctgctccattcgaacaaagattgcctgaacaacaaaaggttttcaatctaccattatttccaactaccaccatcggttccttcccacaaactaaagatatcagaatcaatagaaataagttcaacaaaggtactatttccgctgaggaatacgaaaagtttattaactctgaaattgagaaggtgattagattccaagaagaaatcggcctggacgtcttggtccacggtgaaccagaaagaaacgacatggtgcaatatttcggtgaacagatcaacggttatgctttcactgttaacggttgggttcaatcttatggttctcgttacgttagaccaccaatcatcgtaggtgacctaagccgtccaaaggctatgagtgtcaaagaatccgtttacgctcaatccattacatccaagccagttaagggtatgttgaccggtcccataacttgtttgagatggtctttcccaagagatgatgtcgaccaaaagacacaggcaatgcaattagccttggctttgagagacgaagtcaacgatttagaggcggccggtattaaggtcattcaagttgacgagccggcgctccgcgaaggattacctttgcgtgaagggacggagaggagtgcctactacacctgggctgctgaagccttcagagttgccactagtggtgttgctaacaagacccaaatccactctcatttctgctactctgacttggacccaaaccacatcaaagctcttgatgctgatgtagtttccatcgaattctctaagaaggatgacgctaattacatcgctgaatttaaaaactatcctaaccatattggtttaggcctgttcgatattcactcccctcgtattccatctaaggacgagttcattgctaaaatttctaccattttgaaatcctacccagctgaaaaattctgggttaacccagactgtggtttgaagacaagaggctgggaagaaactaggctttcattgactcacatggtcgaagcagctaagtattttagagaacaatacaagaactaa

SEQ ID NO: 4932 - DNA, 618 bp, Artificial Sequence
  Optimized genes for Saccharomyces cerevisiae
atgtctgatcctagctccatcaacggtggtattgttgtcgccatgaccggtaaagactgtgttgccatcgcttgtgatttgagattagggtctcaatctttgggtgtttctaacaagtttgaaaagatcttccattacggtcacgttttccttggtatcactggtttggctactgatgtcaccactttgaacgaaatgttccgttacaagaccaatttatataaactgaaggaagaacgtgctattgaaccagagactttcactcagttagtttcctcatcgttgtacgaaagaagatttggtccatactttgtcggacctgtagtggccggtattaactccaaatctggtaagccattcattgctggtttcgacttgattggttgcattgacgaagctaaggactttattgtctccggcacagcatctgaccaattgttcggtatgtgtgaatctctatatgagccaaacttggaaccagaagatttattcgaaaccatttcccaagctttgttgaatgctgctgacagagatgccctaagtggttggggtgctgtcgtttacatcatcaagaaggatgaagttgttaagagatacttgaagatgagacaagattaa

SEQ ID NO: 4933 - DNA, 804 bp, Artificial Sequence
  Optimized genes for Saccharomyces cerevisiae
atgtccacttctcgtgaagactccgtctacttggctaagttggcagagcaagctgaacgttacgaagaaatggttgaaaacatgaaaaccgttgcttcttctggtcaagaactatctgttgaggaaagaaacttgttatcagtggcctataagaacgtcattggtgctagaagagcttcctggagaattgtctcttccatcgaacaaaaggaagaaagtaaagaaaagtctgaacatcaagttgaattaatctgttcttacagatccaagattgaaactgaattgaccaaaatttctgatgatatcctgtcggtcttggactctcatttgattccatctgccaccactggtgaatctaaggttttctactacaagatgaagggtgactaccacagatatttagcagaattttcatccggtgatgctagggaaaaagctaccaatgcgtctttggaagcttacaagactgcctccgaaatcgctactaccgaattgccacctacacatcctatcagattgggtttggctttgaacttctccgttttttactatgaaattcaaaactctccagacaaggcttgtcacttggccaagcaagctttcgatgacgctattgccgagctagatacattaagcgaagagagctataaggactcaactttgatcatgcaattgttgagagacaatcttacgttatggactagtgatatgtctgaatccggccaagccgaagatcaacaacaacaacaacaacaccaacagcagcaaccaccagctgctgccgaaggtgaggctccaaaataa

SEQ ID NO: 4934 - DNA, 330 bp, Artificial Sequence
  Optimized genes for Saccharomyces cerevisiae
atgagtgatgctggtagaaagggatttggtgaaaaggcctctgaagctttgaagccagattctcaaaagtcttatgctgaacaaggtaaggaatacattaccgacaaggctgataaagttgccggtaaggttcaaccagaagacaacaagggtgttttccaaggtgtccatgactctgctgaaaaaggtaaagataatgccgaaggtcaaggcgagtcattagcagaccaagctagagactacatgggtgctgctaagtccaagttgaacgatgccgtggagtacgtttccggtcgtgtccacggtgaagaagatcctactaagaaataa

SEQ ID NO: 4935 - DNA, 621 bp, Artificial Sequence
  Optimized genes for Saccharomyces cerevisiae
atgaactctgaatatgactatttattcaaactgttgttgattggtaactccggtgtcggtaagtcatgcttactacttcgtttttctgatgacacttacaccaatgactacatttcgaccatcggagttgatttcaagatcaagactgttgaattggacggtaaaaccgtcaagttgcaaatttgggatactgctggtcaagaaagattcagaaccattacttcttcttactacagaggttcccacggtatcatcattgtttacgatgtcacagaccaagagtctttcaacggtgttaagatgtggttacaggaaattgacagatacgccacttccacggttttgaaattattggttggtaacaagtgtgatttgaaggataagagagtcgtggagtatgatgttgctaaggaatttgctgatgccaacaaaatgccatttttggaaaccagtgcactagacagcacaaatgtcgaagatgctttcttgactatggctagacaaatcaaagaatccatgtctcaacaaaacttgaacgaaactactcaaaagaaggaagacaagggtaatgtaaatttgaagggccaatctttgaccaacactggtggtggttgttgttaa

SEQ ID NO: 4936 - DNA, 1128 bp, Artificial Sequence
  Optimized genes for Saccharomyces cerevisiae
atggactctgaagttgccgctttggtcattgacaatggttccggtatgtgtaaggctggatttgctggtgacgatgctcctagggccgtctttccctcgattgtcggtagaccaagacaccaaggtattatggttggtatgggtcagaaagactcatatgtgggcgacgaagctcaatccaagagagggatcttgacattaagatacccaattgaacacggtattgttaccaactgggatgatatggaaaaaatctggcatcatacgttttacaacgaattgagagttgctccagaagaacatccagtcttgttgactgaagccccaatgaacccaaagtctaacagagaaaagatgactcaaatcatgtttgaaaccttcaacgtcccagctttctacgtttccatccaagctgtcttatcattatattccagcggccgtacaactggtattgtgttggactccggtgatggtgttactcacgttgttccaatctacgccggtttctccttgccacacgctattctgagaattgatctagcaggtagagaccttactgactatttgatgaaaattctttcagagcgtggttactcctttagcaccactgccgaacgtgaaatcgtcagagatatcaaggaaaagttgtgttatgtagcattggatttcgaacaagaaatgcaaactgctgctcagtcctcttccattgagaaatcttacgaattacctgacggtcaagttatcactattggtaatgaaagattcagagctcctgaggccttattccatccttctgttttgggtttggaaagtgccggcatcgatcaaaccacctacaattctatcatgaagtgcgacgtagatgttagaaaagagttgtacggtaacatcgttatgtctggtggtactaccatgttcccaggtatcgctgaaagaatgcaaaaggaaattaccgcgctagcaccatcttctatgaaggttaagattattgctccaccagaaagaaagtactctgtctggatcggtggttctattttggcttctttgaccactttccaacaaatgtggatttctaagcaagaatacgatgaatctggtccaagtatagtccaccacaagtgtttctaa

SEQ ID NO: 4937 - DNA, 765 bp, Artificial Sequence
  Optimized genes for Saccharomyces cerevisiae
atgtctattgctgaatttgcctacaaggagaagccagaaactttggttcttttcgacgtggatggtaccttgacccctgctagactaactgtttccgaggaagttagaaagacattagcaaaattgagaaacaaatgctgtatcgggttcgtcggaggcagcgatttgtccaagcaattagaacaattgggtccaaatgttttggacgaattcgattatagtttctctgaaaacggtttgactgcttacagattgggtaaggaattggcttctcagtctttcattaactggttaggtgaagaaaaatacaacaagttggccgtatttattttgcgttatctatccgaaatcgacttgccaaagagaagaggtacttttttggaatttaggaatggtatgatcaacgtctctccaattggtagaaatgcctcaacagaggaaagaaacgaatttgaacgttacgataaagaacaccaaatcagagctaagttcgttgaagctttgaagaaggaattcccagattatggtttaactttctccatcggtggtcaaatttcgtttgatgttttcccagctggttgggacaagacctactgtttgcaacatgtcgaaaaggacggtttcaaggaaattcacttcttcggtgacaaaaccatggttggtggtaacgactacgaaatatttgttgatgaaagaaccattggccattctgtccaatctcctgatgacactgtcaagatcctgactgaattattcaacttgtaa

SEQ ID NO: 4938 - DNA, 765 bp, Artificial Sequence
  Optimized genes for Saccharomyces cerevisiae
atgggtagagtcatcagaaaccaaagaaagggtgccggtagtattttcacttctcatactagactaagacaaggtgctgccaaattaagaaccctggattatgctgaaagacacggttacattagaggtatcgtcaagcaaattgtccacgactctggtcgtggtgctccattggctaaggttgttttcagagacccatacaagtatcgtttgagagaagaaatctttattgccaacgaaggtgtacataccggtcaatttatctacgctggtaaaaaagcctctttgaacgttggtaatgttttgccattgggttccgttccagaaggtactatcgtgtcaaatgtcgaggaaaagccaggtgaccgtggcgctttggccagagcttctggtaactacgttatcatcattggtcacaacccagatgaaaacaagacccgtgttagattacccagcggcgccaagaaggtcatttcttctgatgctaggggagtgatcggtgtcatagcagggggaggtagagttgacaagcctctacttaaagcaggccgtgctttccacaagtacagattgaagagaaattcttggccaaagacaagaggtgttgctatgaaccctgtcgatcatccacatggtggtggtaaccaccaacacattggtaaggcttccaccatttccagaggtgctgtttccgggcagaaagcgggtttaattgctgctagaagaactggtttgttgagaggttctcaaaagactcaagattaa

SEQ ID NO: 4939 - DNA, 180 bp, Artificial Sequence
  Optimized genes for Saccharomyces cerevisiae
atggctaagtccaagaaccatactgctcacaaccaaaccagaaaggcccatcgtaatggtattaagaagccaaagacctataagtacccatctttgaagggtgttgatcctaaattcagaagaaaccacaagcacgctttacacggtactgccaaggctttggctgctgcaaaaaaataa

SEQ ID NO: 4940 - DNA, 1458 bp, Artificial Sequence
  Optimized genes for Saccharomyces cerevisiae
atggttcacttgggtccaaagaagccacaagcccgtaagggctccatggctgatgttccaaaggaattgatggatgaaatccatcaattggaagacatgtttaccgtcgattctgaaactttgagaaaggttgttaagcatttcattgacgaattgaataagggtttgaccaagaaaggtggtaacattccaatgatcccaggttgggttatggaattcccaactggtaaagaatctggtaactacttggcaattgatttgggtggtaccaacttacgtgtcgttttggtgaaactgagtggtaatcatacttttgataccactcaatctaagtacaaattgccacacgatatgagaaccacaaagcaccaagaagaattatggtcttttattgccgactccttaaaggacttcatggtcgaacaagagttgttgaacactaaagacacgctccccctaggtttcactttctcttacccagcttcccaaaacaagatcaacgaaggtattttgcaaagatggactaagggttttgacattccaaacgttgaaggccacgacgtcgtcccattgttacagaatgagatttccaagagagaattgccaattgaaattgttgctctaatcaatgacactgttggtactttgatcgcttcttattatacagatcctgaaaccaagatgggtgttatttttggtacaggggttaacggtgccttctacgatgtagtttctgacatcgaaaagttagaaggtaagttggctgacgacataccatctaactcccctatggccattaactgtgaatacggttctttcgacaatgaacatttggtcttgcctagaactaagtatgatgtcgctgtcgacgagcagtctccaagaccaggtcaacaagctttcgaaaaaatgactagtggatactacttaggtgaactgctaaggcttgtgttattggagttaaacgagaaaggtttaatgttgaaggaccaagatctaagcaaattgaagcaaccatacatcatggacacctcatatccagccagaattgaagatgacccatttgaaaacttggaagatactgatgatatcttccaaaaggatttcggtgtcaagaccacacttccagaaagaaagctaatcagaagattgtgcgaattgattggcaccagagctgcacgtttagctgtttgtggtatcgccgctatctgtcaaaaaagaggttacaagactggtcacattgctgccgatggttcagtctacaacaaatatcctggtttcaaggaagctgctgctaagggattgagagatatttacggctggaccggtgacgcttcgaaagatccgatcactatcgtacctgctgaagacggttccggtgctggtgcggccgttatcgcagctttgtccgaaaagagaatcgccgaaggtaagtctttggggattattggtgcttaa

SEQ ID NO: 4941 - DNA, 2757 bp, Artificial Sequence
  Optimized genes for Saccharomyces cerevisiae
atgactgatactagttcaagctcctcctcttcatccgcctcatctgtctccgctcaccaaccaactcaagagaaaccagctaagacttacgatgatgctgcttccgaatccagtgatgacgatgacattgatgctttgattgaagaattgcagtctaaccatggtgtcgatgatgaagactccgacaatgatggacctgttgcagccggtgaagctagaccagttccagaagaatacttgcaaacagacccatcttacggtttaacttctgatgaagtcctaaagagaagaaagaaatatggtttgaaccaaatggccgacgaaaaagaatctttggttgttaagttcgtcatgttcttcgtcggtccaattcaattcgttatggaagcagctgcaatcttggctgctggactctctgactgggttgactttggtgttatctgtggtctattgatgttgaatgctggtgttggctttgttcaagaattccaagctggttccatcgtagacgagttgaagaagactttggctaacaccgctgtcgtcatcagagatggccaattggtggaaatcccggccaacgaagttgtacccggagacatcctgcagctagaagacggtaccgttattcctactgatggtaggatagtgacggaggactgtttcttacagatcgaccaatctgctatcactggtgaatctttggctgttgataagcattacggtgatcaaaccttctcttcttctaccgtcaagcgtggtgaaggttttatggttgtcactgctacgggtgacaacactttcgttggtagagccgctgccttggttaacaaggctgccggtggtcaaggtcacttcaccgaagtattgaacggtatcggtatcattttgttggtcttggtcattgctaccttgctgcttgtctggactgcttgtttttacagaactaatggtattgtcagaatccttcgttacactttgggtattactattattggtgttcctgttgggttgcctgccgttgttaccaccactatggctgttggtgctgcttacctagctaaaaaacaagccattgtccaaaagttgagcgcaattgagtcgttagcaggcgtagagattttgtgttccgataaaaccggtactttgaccaagaacaaattgtcattgcacgaaccatatacagttgaaggtgtctctccagatgatttaatgttgacagcatgcttggccgcctccagaaagaagaagggtttagatgccattgacaaggctttcttgaagtccttgaagcaatacccaaaggccaaggacgctttgactaaatacaaggtcttggaatttcacccatttgaccctgtgtccaagaaggttactgccgtggtagaaagtcccgaaggtgaaagaattgtttgtgttaagggtgccccattgtttgtgttaaagacagttgaggaagatcatccaatcccagaagatgttcatgagaactatgaaaataaagttgctgaattagccagcaggggtttcagagctttaggtgttgccagaaaaagaggtgagggtcattgggaaattcttggcgtcatgccatgtatggatccaccaagagacgacaccgctcaaactgtttctgaagctagacacttaggattgagagtcaagatgctgacaggtgacgctgtgggtattgctaaggaaacctgtagacaattgggtctggggaccaacatttacaacgccgaaagattaggtttgggtggtggtggcgacatgccaggttctgaattggcggattttgtcgagaatgcagatgggtttgctgaagttttcccacaacacaagtacagagttgtcgaaatcctacaaaacagaggttatttagtcgctatgaccggtgatggtgttaatgacgcaccatccttgaaaaaagctgacactggtatagctgtcgaaggtgctactgacgcggctcgttctgccgctgatatcgtcttccttgctcctggtttgtctgctatcatcgatgctttgaagacctctcgtcaaatcttccacagaatgtattcgtatgtcgtttaccgtatcgctttgtccctacacttggaaatttttcttggcctatggattgctattttagacaactctttggacattgacttgatcgttttcatcgccattttcgctgatgtcgccactttggcgatcgcttatgataacgctccatactctccaaagcctgtcaaatggaacttgccacgcttatggggtatgtctatcatcctcggtattgttttggctattggctcctggataacactgactaccatgtttttacctaaaggtggtattatccaaaatttcggtgctatgaacggtatcatgttcttgcaaatttcgttgactgaaaactggttaatctttattaccagagctgctggtccattctggtcctcaattccatcttggcaattagctggcgcagtttttgccgtcgacattattgccacaatgttcactttattcggttggtggagcgaaaactggaccgatattgtcaccgttgtgcgtgtttggatctggtctattggtatcttctgcgttctaggtggtttctactacgaaatgagtacatcagaagccttcgacagattgatgaatggtaagccaatgaaggaaaagaagtctactagatctgttgaagatttcatggctgccatgcaaagagtttccacccaacatgaaaaggaaacttaa

SEQ ID NO: 4942 - DNA, 318 bp, Artificial Sequence
  Optimized genes for Saccharomyces cerevisiae
atggctccagttaaatctcaagaatccatcaaccaaaagctggctttggttatcaagtctggtaagtacactttaggttacaagtcaacagtcaagtccctaagacaaggtaaaagcaagttgattattattgccgccaatactccagtcttgagaaagagtgagcttgaatactacgctatgttgtccaagaccaaggtttattatttccaaggtggtaacaacgaattgggtactgcagtgggcaaattatttcgtgtcggtgttgtttctattttggaagctggtgactctgatatcttgaccactttggcttaa

SEQ ID NO: 4943 - DNA, 468 bp, Artificial Sequence
  Optimized genes for Saccharomyces cerevisiae
atgaaggtcgaaattgactctttctccggtgccaagatctacccaggtagaggcaccttgtttgttagaggtgactccaagattttcagattccaaaactccaagtctgcttctttgttcaagcagcgtaagaacccaagaagaattgcttggactgtcttatttaggaagcatcacaagaagggtatcactgaagaagttgccaaaaagagatccagaaagaccgttaaggctcaaagacctattactggtgcatcgctagatttgatcaaggaaagaagatctttaaagccagaagtcagaaaggctaacagagaagaaaagttgaaggccaataaagaaaagaagaaagctgagaaagccgcccgtaaggctgaaaaagcaaaaagcgctggtactcaatctagtaagttttctaagcaacaagctaaaggtgctttccaaaaggttgctgctacatcacgttaa

SEQ ID NO: 4944 - DNA, 651 bp, Artificial Sequence
  Optimized genes for Saccharomyces cerevisiae
atgaagaccttgattgtcgttgatatgcaaaacgattttatttcaccattgggttccttaactgttccaaagggtgaagagcttatcaaccctataagtgatttgatgcaagatgctgacagggattggcacagaattgtagtgactagagactggcatccatctcgtcacatttcctttgccaagaaccacaaggacaaggaaccatactctacttatacttaccactctccaagacctggcgatgactccactcaagaaggtattttatggccagtccattgtgttaagaatacctggggttctcaattggtcgaccaaatcatggaccaggtggtcaccaagcatatcaagatcgttgacaaaggtttcttgaccgatagagaatattatagcgcattccacgatatctggaacttccataaaacagacatgaacaaatacttggaaaagcaccatacagatgaagtttacattgttggtgttgctttggagtactgtgtcaaggccactgctatctctgctgctgaattaggttacaagactaccgttctgctagactacaccagaccaatttctgacgatccagaagtcattaacaaggttaaagaagaattgaaggctcacaatatcaatgttgtcgataaataa

SEQ ID NO: 4945 - DNA, 1533 bp, Artificial Sequence
  Optimized genes for Saccharomyces cerevisiae
atgcctaccagcggcactaccattgaattgattgacgaccaattcccaaaggacgattccgcctcttccggtattgtcgacgaagttgatttaactgaagctaacattttggctactggactaaataaaaaggctccaagaattgttaacggtttcggttctttgatgggttccaaggaaatggtatctgttgaattcgacaagaaaggtaacgaaaagaagtctaacttggacagattgttggaaaaagacaaccaagaaaaggaggaggcaaagaccaaaattcacatttctgaacaaccatggaccctaaacaactggcatcaacatttaaactggttgaacatggttttagtctgtggtatgccaatgatcggctggtacttcgctttaagtggtaaggtcccattacatttgaatgttttcctcttctccgttttttactatgccgtcggaggtgtttctatcactgctggttaccataggctgtggtcccaccgttcttactctgctcactggccattgcgtttgttctacgccatcttcggttgtgcttctgtggaaggttcagcaaagtggtggggtcactctcatcgtatccatcatagatacaccgatactttgagagatccatacgacgccagaagaggtttatggtattctcacatgggttggatgctgttgaagccaaatcctaagtacaaggctagagctgacatcaccgacatgactgatgattggactattagattccaacacagacactatatcttgttaatgttgttgacagcctttgttatcccaaccctaatctgtggctactttttcaacgactacatgggtggtctaatatatgctgggttcattagggtgttcgttattcaacaagctacattttgcattaattcattagcccactacattggtactcagccctttgatgaccgtagaactccaagagacaattggattactgccattgttacctttggtgaaggttaccacaacttccaccacgaatttcctacagattatagaaacgccatcaaatggtaccaatatgatcctacgaaagtaatcatctacttgacctccttagttggtcttgcttacgatttgaaaaaatttagtcagaatgctatcgaagaagctttgatccaacaagagcaaaagaagattaacaagaagaaagctaagatcaactggggtccagttttgactgacttgccaatgtgggataagcaaactttcttggccaagtccaaggaaaacaagggtcttgtcattattagcggtatcgttcacgatgtctctggttatatttccgagcatccaggtggcgaaaccttgatcaagactgcattgggtaaagatgctaccaaggcattttcaggtggtgtctacagacattcgaatgctgctcaaaacgtcttggctgatatgagagttgctgtcataaaagaatctaagaactctgcgatcagaatggcttccaagagaggtgaaatttacgaaactggtaagttcttctaa

SEQ ID NO: 4946 - DNA, 735 bp, Artificial Sequence
  Optimized genes for Saccharomyces cerevisiae
atggctgccgaaaaaattttgactccagaatctcagctaaagaagtccaaggcccaacaaaagaccgctgaacaagttgctgcagagagagccgccagaaaggctgccaataaggaaaagcgtgccattatattagagcgtaatgcggcataccaaaaagaatatgaaactgctgaaagaaacatcattcaagctaagagagacgctaaagctgctggttcttactacgttgaagctcaacataaattagtgtttgttgtcaggatcaagggtattaataagattccaccaaagccacgtaaggttttgcaattattgagattgaccagaattaactccggaacctttgtcaaggtcaccaaggctactttggaattgttgaagctaattgaaccatacgtcgcttacggttacccatcttatagcacaatcagacaattggtctacaagagaggtttcggtaagatcaacaagcaaagagttcctctttctgacaacgctatcatcgaggctaacttggggaaatatggtatcttgtccatcgatgatttgattcacgaaattattactgttggtccacatttcaaacaggccaacaacttcttatggccattcaagttgagtaatccttctggtggttggggtgttccaagaaagttcaagcacttcatccaaggtggctcatttggtaacagagaagaattcattaacaaactggtaaaatccatgaactaa

SEQ ID NO: 4947 - DNA, 450 bp, Artificial Sequence
  Optimized genes for Saccharomyces cerevisiae
atgccatctagattcacaaaaaccaggaaacacagaggtcacgtttccgcaggaaagggtagaattggtaagcacagaaagcatcctggcggtcgtggtatggctggtggtcaacatcatcaccgtatcaacatggataagtaccatccaggttattttggtaaggttggtatgagatacttccacaagcaacaagctcacttctggaagccagttttgaacttggataaattatggactctaattccagaagacaagagagaccaatacttgaagtctgcctcaaaggaaaccgctccagtcattgacactttggccgctggttacggtaaaatcttaggcaaaggtagaatcccaaatgtgcctgttattgtcaaggctagatttgtctccaagttggctgaagaaaagatcagagctgccggtggtgttgtcgagctgattgcttaa

SEQ ID NO: 4948 - DNA, 765 bp, Artificial Sequence
  Optimized genes for Saccharomyces cerevisiae
atgtctgccccagaagctcaacaacaaaaaagaggtggtttcggtggtagaaacagaggcagaccaaatagaagaggtccaagaaatactgaagaaaagggttgggttccagtcaccaagctaggcagattggtcaaggccggtaaaatcactaccattgaggaaattttcttgcactctttgccagttaaggaattccaaatcattgatacactgttaccaggtttgcaagatgaagtcatgaacatcaaacctgtccaaaagcagacgagggcaggccaaagaactagattcaaggctgttgtcgttgttggtgactccaacggtcacgtcggtttaggtatcaagactgctaaagaagttgctggtgctatcagagctgggataattattgctaagttgtccgttatcccaattcgtcgtggttactggggtaccaacttgggtcaaccacatagccttgccacaaaaaccactggtaagtgtggttctgttactgttagattaattccagctccacgtggaagtggtattgtcgcttctccagccgtaaagaaattgttgcagttggctggtgttgaagatgtttacactcaatccaatggtaagaccagaaccttggaaaacactttgaaggctgctttcgtggccattggtaacacctatggttttttgactccaaacttatgggctgaacaacctctacccgtgtcgcctttggacatctactctgacgaggcatcagcccaaaagaagagattttaa

SEQ ID NO: 4949 - DNA, 1131 bp, Artificial Sequence
  Optimized genes for Saccharomyces cerevisiae
atgtccactttcggtaaattattcagagttaccacctacggagagagtcattgtaagtcagtcggttgtatcgtcgacggtgttccccctggtatgtctttgaccgaagccgatatccaaccacaattgactagaagaaggccaggtcaatccaaactttctacaccgagggatgaaaaggacagagtggagattcaatctggtactgaatttggtaagactttgggtaccccaattgccatgatgattaagaacgaagaccaaagacctcacgattattccgacatggacaaattcccaagaccatctcatgctgatttcacttactctgaaaagtacggtatcaaggcttcttcaggtggtggtcgtgcctctgccagagaaacaataggccgtgttgcttcaggcgccattgctgaaaagtttctggctcaaaatagtaatgttgagattgtagcgtttgtcactcaaatcggtgaaatcaagatgaacagagactctttcgatccagaattccaacatttgttgaacactatcacccgtgagaaggttgactccatgggtccaatcagatgcccagatgctagcgtagccggtttgatggttaaagaaattgaaaaatacagaggtaacaaggattccatcggaggtgttgtgacttgtgttgttagaaacttgccaaccggtttaggtgaaccatgtttcgacaagttggaagctatgttggcccacgctatgctatctatccctgcatcgaaaggctttgaaattggttccggtttccagggtgtctccgttccaggttctaagcacaacgatcctttctacttcgaaaaggaaactaatagattgagaaccaagaccaacaactctgggggcgtccaaggtggtatttccaatggtgaaaacatctacttttctgttccattcaagtctgtcgctaccatttctcaagaacaaaagacagccacttatgatggtgaagaaggtattttagctgctaagggtagacacgacccagctgttactccaagagctattccaattgttgaagcaatgactgctttggtcctagctgacgctttattgattcagaaagctagagattttagccgttccgtcgtccactaa

SEQ ID NO: 4950 - DNA, 360 bp, Artificial Sequence
  Optimized genes for Saccharomyces cerevisiae
atgccaaaaaaaagagcttctaacggtcgtaataagaagggtagaggtcacgtcaagccagttagatgtgttaactgttccaagtctattccaaaggacaaggctatcaagagaatggccatcagaaacattgttgaagctgctgctgtcagagatttgtccgaggcatctgtctatccagaatacgctttgccaaagacttacaacaaattgcactactgtgtctcatgcgccattcatgctagaatcgtgagagttcgtagtcgtgaagacagaaagaatagggcgcctcctcaaagaccaagattcaacagagaaaacaaggtttctccagctgatgctgccaagaaagccttataa

SEQ ID NO: 4951 - DNA, 612 bp, Artificial Sequence
  Optimized genes for Saccharomyces cerevisiae
atggcttcttttgcaaccaagtttgtcattgcctgctttttattcttctctgccagcgctcacaacgtcttgttgccagcttacggtagaagatgtttctttgaagacttgtccaagggcgatgagttatccatttctttccaattcggtgaccgtaatcctcaatcctcctctcaattaaccggtgatttcatcatctacggtccagaaagacacgaagtgttgaagaccgttagagacacttcccatggtgaaatcactttgtcagccccatacaagggtcatttccaatactgtttcttgaacgaaaacacaggtattgaaactaaggatgtcactttcaacattcacggtgtagtctacgttgatttggatgacccaaacaccaacacacttgattcagctgtcagaaagttgagtaaactgacgcgtgaggtcaaggacgaacaatcttacattgttatcagagaaagaacccacagaaatactgctgaatctactaatgacagagttaaatggtggtctatcttccaattgggtgttgttattgctaactcgctatttcagatatattatctacgtaggtttttcgaagttacttctttggtttaa

SEQ ID NO: 4952 - DNA, 264 bp, Artificial Sequence
  Optimized genes for Saccharomyces cerevisiae
atggtttcccaattatttgaagaaaaagcaaaggctgtcaatgaattgccaaccaagccttccactgatgaactattggaattatacgctttgtacaagcaagctactgttggtgacaacgataaagagaagccaggtattttcaacatgaaggacagatataaatgggaagcttgggaaaacttgaagggtaagtctcaagaagatgctgaaaaggaatacatcgccctggtcgaccaattgattgccaagtactcttcataa

SEQ ID NO: 4953 - DNA, 930 bp, Artificial Sequence
  Optimized genes for Saccharomyces cerevisiae
atgtctgctgtcttcaacaatgccaccttaagcggcctagtgcaggcatctacttactcccaaaccttgcaaaacgttgctcattaccaacctcaattaaacttcatggaaaaatactgggctgcttggtactcttacatgaacaacgatgttttggctactggtttgatgttttttttgttacacgaatttatgtatttcttcagatgtttgccatggttcatcattgaccaaattccatactttcgtcgttggaagttacaaccaaccaagattccctctgccaaggaacaattgtactgtctgaaatcagtcttgttgtcccacttcttggtcgaggccattcctatctggactttccatccaatgtgtgaaaagttgggtatcactgttgaagttccattcccatccttgaagaccatggctttggaaatcggtctattctttgtactggaagacacttggcattattgggcccataggcttttccactacggtgttttctacaagtacatccacaagcaacatcacagatacgccgccccatttggattatccgcagaatacgctcacccagctgagacattatcactaggtttcggtactgtcggtatgccaattttgtatgttatgtacaccggtaaattgcatttattcactttgtgtgtctggattactttgagattgttccaagctgttgattcgcactctggttacgattttccatggtctttgaacaagatcatgcctttctgggctggtgctgaacaccacgatttgcaccatcattattttattggtaactatgcgagttctttcagatggtgggactattgcttggacacagagtccggtccagaagctaaggcttctagagaagaaagaatgaagaagagagctgaaaataatgctcaaaagaaaaccaactaa

SEQ ID NO: 4954 - DNA, 525 bp, Artificial Sequence
  Optimized genes for Saccharomyces cerevisiae
atgtctaccaaggctcaaaacccaatgagagatttgaaaattgaaaaattagttttgaacatttccgttggtgaatctggtgaccgtcttaccagagcttccaaggttctagagcagctgagtggtcaaactcctgttcaatctaaggccagatacaccgtcagaacttttggaatcagacgtaatgaaaagatcgccgtccacgttactgtacgtggtccaaaggctgaagaaattttggaaagaggtttgaaggtcaaggaataccaattgagagacagaaacttcagcgcaactggtaattttggtttcggcatcgatgaacacattgacttgggtatcaagtatgacccatctattggtattttcggtatggatttctacgttgtcatgaacagaccaggtgctagagtgacaaggagaaagagatgtaagggtactgtcggtaactcacataaaacaaccaaagaagacactgtttcctggttcaagcaaaagtacgatgctgatgttttagataaataa

SEQ ID NO: 4955 - DNA, 438 bp, Artificial Sequence
  Optimized genes for Saccharomyces cerevisiae
atgggtaaaggtaagccaagaggtttgaatagtgcaaggaaattgagagtccacagaagaaacaacagatgggctgaaaataactacaagaagagattattaggtactgccttcaagagctcaccctttggtggttcttctcatgctaagggaattgttctagagaagttgggtattgaatccaagcaaccaaactccgctatcagaaagtgtgttcgtgtccaattgatcaagaacggtaagaaggttaccgctttcgttccaaatgatggttgtttgaactttgttgacgaaaacgatgaagttttgttggctggtttcggtagaaagggcaaagccaagggtgacattccaggtgtcagattcaaagtggtcaaggtctctggtgtttctctgcttgctttatggaaggaaaagaaagaaaaacctcgttcctaa

SEQ ID NO: 4956 - DNA, 468 bp, Artificial Sequence
  Optimized genes for Saccharomyces cerevisiae
atgaaggttgaagttgattctttctctggtgctaagatctacccaggtagaggtaccctttttgttcgtggtgactctaagattttcagattccaaaactccaagtctgcttctctattcaagcagcgtaagaacccaagaagaattgcttggactgtcttatttagaaaacatcacaagaagggtatcactgaagaggtggcaaagaagagatccagaaagaccgtcaaggctcaaagacctattactggtgcctctttggatttgatcaaggaaagaaggtcattgaagccagaagtcagaaaggctaacagagaagaaaagttgaaagccaataaagaaaagaaaagagctgaaaaagccgccagaaaagcagagaaggccaagagcgctggtgttcaaggttccaaagtttccaagcaacaagctaaaggcgctttccaaaaggtcgctgctacaagtcgttaa

SEQ ID NO: 4957 - DNA, 1038 bp, Artificial Sequence
  Optimized genes for Saccharomyces cerevisiae
atggaagctcataaccaattcttgaagacctttcaaaaggaacgtcatgatatgaaggaggctgaaaaagatgaaatattattgatggagaattccagaagattcgttatgttcccaatcaagtaccatgaaatctgggctgcttacaagaaggttgaagcgagtttctggactgccgaagaaattgaattggccaaggacactgaagatttccaaaaattgactgatgaccaaaagacttacatcggtaacttattagctttgtctatttcttcagacaacttggtcaacaagtacttgattgaaaacttttcagctcaattgcaaaacccagaaggaaaatctttctacggtttccaaatcatgatggaaaatatctactccgaagtttactctatgatggttgatgcctttttcaaggatccaaagaacattccattgttcaaagagattgctaatttgccagaagtcaagcacaaggctgccttcatcgaaagatggatttccaacgatgactctctatatgcagaaagattggttgctttcgccgcaaaagaaggtattttccaggcaggcaattatgcttccatgttttggttgaccgacaagaaaattatgccaggtttggctatggctaacagaaacatctgtcgtgacagaggtgcttatacagatttttcttgtttgctttttgctcacttgagaaccaagccaaatcctaagattattgaaaagatcatcacagaagccgtagagatcgaaaaggaatattattcgaactctttgcctgtcgaaaaatttggtatggacttgaaatccattcacacctacattgagtttgtggctgatggtttactacaaggtttcggtaacgaaaaatactacaacgctgttaatccctttgaattcatggaagacgttgccactgctggtaagactaccttcttcgaaaagaaggtcagcgactaccaaaaggccagtgacatgtctaagtctgctactccatccaaggaaatcaacttcgatgatgacttctaa

SEQ ID NO: 4958 - DNA, 201 bp, Artificial Sequence
  Optimized genes for Saccharomyces cerevisiae
atgtctttctcctcattatataaaacattcttcaagagaaatgcagtttttgttggtactatctttgccggtgctttcgttttccaaactgtctttgacaccgccattacctcttggtacgaaaaccacaacaagggtaagttgtggaaggatgtcaaggctagaattgctgctggtgatggtgacgatgatgacgaataa

SEQ ID NO: 4959 - DNA, 999 bp, Artificial Sequence
  Optimized genes for Saccharomyces cerevisiae
atggttagagttgctattaacggtttcggcaggattggtagattggtcatgagaatcgcgctatccagaccaaacgttgaagtcgtcgctttgaacgacccattcatcactaatgattacgccgcttacatgttcaagtatgattccactcatgggcgttatgctggtgaagttagtcacgatgacaagcatatcattgttgatggtaagaaaattgctacctaccaagaaagagatccagctaatctaccatggggttcttccaacgtcgatattgccattgacagtacaggcgttttcaaagagttggacactgctcaaaagcacattgatgccggtgctaagaaggtagttattactgccccttcctcaactgctccaatgtttgttatgggtgttaacgaggaaaagtacacttccgatttgaagatcgtttccaatgcctcttgtaccaccaactgtttggctcctttagcaaaagttatcaatgacgcatttggtatcgaagaaggtttgatgactaccgttcactctttgacagccactcagaaaactgtcgacggtccatcccacaaggactggagaggtggtagaaccgcttccggtaacatcataccatcttctaccggtgccgccaaggctgttggtaaggtcttgccagaattgcaaggtaaattgactggtatggctttcagagtccccacagtagatgtttctgttgttgacttaacggttaagttaaacaaggaaaccacttacgatgaaatcaagaaggttgtcaaagcagctgctgaaggaaaattaaagggtgtccttggttacaccgaagacgctgtcgtgagctctgatttcttgggtgactctcattcttcaattttcgatgcttctgctggtattcaattgtctccaaagtttgtcaagctggtctcttggtacgacaacgaatacggttattcgacccgtgtggtggacttagtcgaacacgttgccaaggcttaa

SEQ ID NO: 4960 - DNA, 2841 bp, Artificial Sequence
  Optimized genes for Saccharomyces cerevisiae
atggctggtcaagttttggacggtaaggcttgtgctcaacaattcagatcaaatattgccaacgaaattaagtccattcaaggtcatgttcctggttttgctccaaatctggccatcatccaagtcggtaacagaccagactccgctacttatgtccgtatgaagagaaaggctgccgaagaagcaggtatcgttgccaacttcatccatttagacgaaagtgccactgaatttgaagtcttaagatacgttgaccaattaaatgaagatcctcacactcacggtatcattgtccaattgcctttacctgctcatttggatgaagatagaattaccagccgcgtgttggctgaaaaggatgtggatgggttcggtccaaccaacattggagagttgaacaagaaaaacggtcatccattcttcttgccatgtaccccaaaaggtattattgaactactacacaaggctaatgtcaccatcgaaggttccagatccgttgttatcggtcgttctgacattgttggttctccagtcgctgaacttttgaagtctttgaactctactgttactatcactcattcaaagacaagggacatcgcttcttacttgcatgatgctgacatcgtggttgttgctataggccagccagaatttgtcaagggtgaatggttcaagccaagagatggtactagttcagacaagaagaccgtcgtaattgatgttggaaccaactacgttgctgatccatcgaagaagtcaggtttcaagtgtgttggtgacgttgaattcaacgaggcgataaaatacgtccacttgatcacaccagttccaggtggtgttggtcctatgactgtcgctatgttgatgcaaaacactttgattgccgcaaaaagacaaatggaagaatcttctaagccattacagatcccaccacttcccttgaagttgttgacccctgttccatctgatatagatatttctagagcccaacaaccaaagttaattaaccaattggctcaagaattggggatctattcccacgaattagaattgtacggtcactacaaagctaaaatttccccaaaggttatcgagagattgcaaactagacaaaatggaaagtacattttggtctctggtattactccaacaccattgggtgaaggtaaatccactaccactatgggtttagttcaagccctaactgctcacctaggtaagccagctattgccaatgttcgtcaaccttctctcggcccaactttgggtgttaagggtggcgctgctggtggtggttattctcaagttattccaatggacgagtttaatttgcaccttacaggggacattcacgctattggtgcagcaaacaacttgttagctgcagcgatcgacaccagaatgttccatgaaaccacccaaaagaacgatgccaccttctacaaccgtttggttccacgtaagaacggtaagagaaagttcactccttccatgcaaagaagactaaataggttaggtattcaaaagactaacccagacgatttgactccagaagaaattaataagtttgccagattaaacattgacccagataccataaccattaaaagggtggtcgatatcaacgacagaatgttgagacaaatcactattggtcaagctccgaccgaaaagaatcatacgcgtgtcactggtttcgatatcaccgttgcttctgaactgatggctatcttggccttgtccaaggacttgagagacatgaaagaaagaatcggtagagttgttgttgcagcggatgtcaacagatctccagttaccgtggaagacgtaggttgtactggtgctctcacagcactgcttcgtgatgctatcaagcctaacttgatgcagaccttggaaggtacccccgttttggttcacgccggtccatttgcaaatatctctattggtgctagttctgttattgctgacagagtcgctttgaaattagtcggtactgaaccagaggccaagacggaagctggctatgttgtgacggaggctggtttcgactttaccatgggtggtgaaagattctttaacatcaaatgtcgtagctccggtctaaccccaaacgctgttgtcttggtagccacagttagagctttgaagtctcatggtggtgctcctgacgtcaaaccaggccaaccattgccatctgcttacactgaggaaaacattgaattcgtcgaaaaaggagctgctaacatgtgtaagcaaattgctaacatcaaacaatttggtgtccctgtcgttgtcgccatcaacaaatttgaaactgacactgaaggtgagatcgccgctattagaaaagcagctttggaagccggtgctttcgaagctgtcacttctaaccactgggctgagggcggtaagggcgctatcgatcttgctaaggccgtcattgaagcctccaaccaacccgtcgacttccacttcttatacgatgttaactcctcggtagaagacaaattgactacaattgtgcagaagatgtatggtggtgccgccatcgatattttaccagaagctcagagaaagattgatatgtacaaggaacaaggtttcggtaatctaccaatttgcattgctaagactcaatactccttgtctcacgacgctaccttaaagggtgtcccaactggctttactttcccaatcagagatgtcagattgagcaatggtgccggttacctgtatgctttagccgctgaaatccaaaccattccaggtttggctacttacgctggttacatggccgttgaagttgatgatgacggtgaaatcgatggtttgttctaa

SEQ ID NO: 4961 - DNA, 759 bp, Artificial Sequence
  Optimized genes for Saccharomyces cerevisiae
atgtctttgccagctacctttgatttgacacctgaagacgcccaattgttattggctgctaacactcatttgggtgctcgtaatgttcaagtccatcaagaaccatatgttttcaacgcaagaccagatggtgttcacgttatcaacgttggtaaaacctgggaaaagttggtcctggctgccagaattattgccgcaattccaaatcccgaagatgttgttgccattagctccagaactttcggtcaaagagctgtcttgaagttcgccgctcacacaggcgcaaccccaatcgctggtagattcactccaggttcatttaccaactacatcaccagatctttcaaagaacctcgtttggttattgtgactgacccaagatccgatgctcaagctatcaaggaagcttcttacgttaacattcctgtaattgctttgactgatttagactctccatctgaatttgtcgatgtcgccatcccatgtaacaacagaggtaagcacagtattggtttgatctggtaccttttagctagagaagttttgagattgcgtggagccctagtggacaggactcaaccatggtccatcatgccagacctatatttctacagagatccagaagaagttgaacaacaagttgctgaagaagctactaccgaagaggccggtgaagaggaggctaaggaagaagtcactgaagaacaggctgaagcgacggaatgggctgaggaaaatgctgacaacgtcgaatggtaa

SEQ ID NO: 4962 - DNA, 1314 bp, Artificial Sequence
  Optimized genes for Saccharomyces cerevisiae
atggctgtgtccaaggtctatgccagatccgtttacgattctagaggtaacccaaccgttgaagtcgaattgaccacagagaagggtgtgtttcgttccatcgttccttcgggcgcaagcacaggtgttcacgaagcattggaaatgagagatggtgacaaatctaaatggatgggtaaaggtgttttgcatgctgtcaagaacgtcaacgatgtcatcgctcccgctttcgtcaaagctaacattgatgttaaggaccaaaaggccgtcgatgatttcttgatttccttggacggtactgccaacaagtccaaattgggcgccaatgccattttgggtgtatctttggctgcgtcaagagctgccgctgcagagaagaacgtaccattgtacaagcacttggctgatctaagtaagagtaaaacttctccatacgttttacctgttccatttttgaatgtcttgaacggtgggtcacacgctggtggtgccttagctttgcaagaatttatgattgctccaactggagctaagacgtttgctgaagctttgcgtattggttctgaagtttatcacaacttgaaatcacttaccaagaagagatacggtgcttccgctggtaatgttggtgatgaaggtggtgttgctccaaacatccaaaccgctgaagaagccctagatcttattgttgatgctatcaaggctgccggtcacgatggcaaaatcaagatcggattagactgtgcttcttccgaattcttcaaggatggtaagtacgacctggacttcaagaatcctaactccgacaagtctaagtggttgactggtccacagctagccgatttatatcattctttgatgaagcgttacccaattgtctctatcgaggacccattcgccgaagatgactgggaagcttggtctcatttctttaagactgcaggtattcaaatcgtggctgacgatctgactgttaccaacccaaagaggatagctactgctattgaaaagaaagcagctgacgctttattgttgaaggttaaccaaattggtaccctaagcgaatctattaaggctgctcaagactcttttgcagccggttggggtgtcatggtttcccacagatctggtgaaactgaagacactttcattgccgacttggttgtcggtttgagaactggtcaaatcaaaaccggtgccccagctagatctgaaagattggccaagttgaatcaattgttaagaatcgaagaagagttaggtgacaatgctgttttcgctggtgaaaacttccatcatggtgataaattataa

SEQ ID NO: 4963 - DNA, 1161 bp, Artificial Sequence
  Optimized genes for Saccharomyces cerevisiae
atgagactgtccaacttgattgctagtgcttcgcttttatccgctgccaccttagctgctccagctaaccacgaacacaaggacaaaagagctgttgttactaccaccgttcaaaaacaaaccactatcattgtcaacggtgctgcttctactccagtcgcagctctagaagaaaatgctgtcgtcaactctgcgcccgcagccgccacatccactacttcctctgctgcttctgttgctactgcagccgcatcaagttccgagaacaattcccaagtttctgccgctgcctctccagcctcctcatcagccgctacctctacccaatctagctcttcttctcaagctagctcctcttccagctctggtgaagatgtctcctcctttgcttcaggcgtccgtggtattacctacaccccatacgaaagttccggtgcttgtaaatccgcatctgaagttgcttctgatttggctcaattgactgatttcccagttatcagattgtatgggacagactgtaaccaagtcgaaaacgttttcaaggctaaagcgagcaatcaaaaggttttcttgggtatttactacgttgaccaaatccaagatggtgttaacaccatcaagtccgccgtggagtcttacggttcttgggatgatgttaccacagtgtctattggtaatgaattagttaatggtaaccaggcaacgccttctcaggttggtcaatacattgactctggtagatctgctttgaaggccgctggttacactggtccagttgtctctgtggacactttcattgccgtcatcaacaacccagaattgtgtgattattccgattacatggctgtaaacgctcatgcttatttcgacaagaacactgttgcccaagactcaggcaaatggttgttggaacaaattcaaagagtctggactgcctgtgacggtaagaagaatgtcgtaataacagagagtggttggccatctaagggtgaaacttatggtgtcgctgtcccttccaaggaaaaccaaaaggatgctgtttccgccatcacttcttcatgcggtgccgatacctttctatttactgctttcaacgactattggaaggctgacggagcttacggtgttgaaaagtactggggtatcttgtctaacgaataa

SEQ ID NO: 4964 - DNA, 942 bp, Artificial Sequence
  Optimized genes for Saccharomyces cerevisiae
atgagattctctaccactttggccacggcagccactgccttattcttcacagcttcccaagtctccgctattggtgaactagctttcaaccttggcgtcaagaacaacgacggcacttgtaaatcgacatcagattatgaaactgaattgcaagccctgaaatcttacactagtaccgttaaggtttacgctgccagcgactgtaacactttacaaaacttgggtccagctgctgaagctgaaggtttcaccatttttgtcggggtctggccaactgatgactcccactacgccgcagagaaggctgctctacaaacctacttgccaaagatcaaggagtccactgttgccggattcttggtcggttctgaagctttgtacagaaacgatttgactgcttctcaattgtccgacaagattaatgacgtcagatccgttgtcgctgacatttctgatagtgatggtaagtcttattccggtaaacaagttggtactgtcgactcttggaacgttttggttgctggttacaactctgctgttattgaagcctcggatttcgttatggctaatgccttttcctactggcaaggtcaaactatgcagaatgcttcatattctttctttgatgatatcatgcaagctttacaggtgattcaatctaccaagggttccaccgatatcactttctgggttggtgaaaccggttggcctaccgacggtaccaacttcgaatctagctatccatctgttgacaacgctaagcaattttggaaggaaggtatctgctccatgcgtgcttggggtgtcaatgtgatcgtatttgaagcattcgatgaagactggaaaccaaacacctctggtacatccgatgttgaaaagcattggggtgttttcacttcttctgacaatttgaagtactctttggactgtgatttttcataa

SEQ ID NO: 4965 - DNA, 366 bp, Artificial Sequence
  Optimized genes for Saccharomyces cerevisiae
atgtctgatttccaaaaggaaaaggttgaagaacaagagcagcaacaacaacaaatcatcaagatcagaattacactaacttccaccaaggtcaagcaattggaaaacgtttcttcaaatattgtgaaaaatgctgaacaacacaacttggttaagaagggtcctgtcagattgccaactaaagttttgaaaatttctaccagaaagactccaaacggtgaaggttccaagacctgggaaacttacgaaatgagaatccataagagatatattgacttagaagctccagttcaaattgtcaaacgtattactcaaatcaccattgaaccaggtgttgatgtcgaagttgtcgtagccagtaactaa

SEQ ID NO: 4966 - DNA, 771 bp, Artificial Sequence
  Optimized genes for Saccharomyces cerevisiae
atggctccaggaaaaaaggtcgcccctgcgccctttggtgctaagagcacaaagtctaataagactagaaatccattgacccattctactccaaagaacttcggtatcggtcaagctgttcaacctaagcgtaatctatcaaggtatgtcaaatggccagagtacgttagagtccaaagacaaaaaaagattttgtccatcagattgaaggtacctccaactattgcccaattccaatacaccttggatagaaacactgccgcagagacattcaagttgttcaacaagtacagaccagaaactgctgctgaaaagaaagaaagattaaccaaggaagccgctgccgttgctgaaggtaagtccaagcaagatgcttctccaaagccatacgctgtcaagtacggtttgaaccacgttgtggcactaattgaaaacaaaaaagctaaacttgttttgattgctaacgatgttgacccaatcgaattggttgttttcttgccagctttatgtaagaagatgggtgttccatatgctattgtcaagggtaaggctcgtttaggtactttggtcaaccaaaagacctctgctgtggctgctttgactgaagtcagagctgaagacgaagctgcactggccaaattagtttctaccattgatgccaactttgctgacaaatacgatgaagttaagaagcactggggtggtggcatcttgggtaacaaggcccaggcaaaaatggacaagagagccaagaattccgacagtgcttaa

SEQ ID NO: 4967 - DNA, 1593 bp, Artificial Sequence
  Optimized genes for Saccharomyces cerevisiae
atgtctgcaaccaagtccattgttggcgaagctttggaatacgtcaacattggtttgtctcatttcttggcactgccgctagcacaaagaatttcattaattattatcattccatttatttacaacatcgtctggcaattattatactctttaagaaaggacagaccaccacttgtgttctactggatcccatgggttggttctgctgttgtctacggtatgaagccatacgagttcttcgaagaatgtcagaaaaaatatggtgatatcttctctttcgtcctgttaggtagggtaatgactgtttacttgggtccaaagggtcacgaattcgttttcaacgctaaattggctgacgtgtcagctgaagccgcctatgctcatttgaccactccagttttcggtaagggagttatctacgattgccctaattctagattgatggaacagaagaagtttgttaaaggtgccctaacaaaggaagctttcaagtcttacgttccactcattgctgaagaggtgtataagtactttcgtgactccaagaacttccgtttgaatgaacgtactaccggtaccattgacgtcatggtcactcaaccagagatgacgatctttaccgcctccagatctctgctaggtaaagaaatgagagccaagttggatactgattttgcttacctatactccgatttagacaagggtttcactcctatcaactttgtctttccaaacttgccattagaacattataggaaacgtgatcatgctcaaaaggctatctctggtacttacatgtccttgatcaaggaaagaagaaaaaacaacgatattcaagatagagacttgattgattcgcttatgaagaactccacatacaaggatggtgtcaagatgaccgaccaagaaattgccaatcttttgattggtgttttaatgggtggtcaacacactagtgctgctacttccgcttggattttgttgcatttagccgaaagacctgatgttcaacaagaattgtacgaagaacaaatgcgtgtcttggacggtgggaagaaggagttgacttacgacttattgcaagagatgccattgttgaaccaaactatcaaagaaaccctaagaatgcatcatccattacatagtttgttcagaaaggttatgaaagacatgcacgtacccaacacttcttatgttattcctgctggttaccacgttttggtctctccaggttatacccacttgagagatgaatatttcccaaatgctcaccaatttaatattcacagatggaacaaggactctgcgagcagttattcagtcggtgaagaagttgactacggctttggtgctatttctaagggcgtttcttccccctatttgccattcggtggtggtagacacagatgtatcggtgaacactttgcctactgtcaattgggtgttttgatgagcatattcatcagaactttgaaatggcactacccagaaggtaagactgtcccacctccagatttcacctccatggttaccttgcctacaggaccagctaagatcatctgggaaaagagaaacccagaacaaaagatttaa

SEQ ID NO: 4968 - DNA, 1392 bp, Artificial Sequence
  Optimized genes for Saccharomyces cerevisiae
atgtccgatggtactcaaaaattatggggtggtagattcactggtgaaaccgatccattgatgcacttgtacaatgcgtctttgccttacgattataaaatgtacaaggctgatttggaaggtaccaaggtctatactgctggtttacagaagttgggcctgttaactgaaacagagttggccaagatccacgaaggtctagcagaaatcaagaaagaatgggatgcagataagtttgttagacacccaaacgatgaagatattcacaccgccaacgaacgtcgtctgggggagctcattggtagagacatagcaggcaaagttcataccggtcgttcgcgtaatgaccaagttgttactgacttaagaatctattgcagggatatcgttaacgacactttgttcccagctttgaagggactggtagaagtcttgatcaaaagagccgagggtgaaattgatgtcttaatgccaggttacactcatttgcaaagagctcaaccaatcagatggtctcattggttgtcttcttacgctacttacttcaccgaagactacaagagattaggccaaatcttgcacagattgaaccaatctccattaggtgccggtgctctagctggtcatccatacggtatcgacagagaatttttggctgaaggtttgggttttaattccgtcatcggtaactccttggttgctgtctctgaccgtgatttcattgtcgaactaatgttctggggtacacttttcatgaaccatatttccagatttgctgaagatcttattatttactgtaccgctgaattcggtttcatccaattaagcgatgcttactctacgggttcttcattgatgcctcaaaagaagaacgccgactctcttgaattgttgagaggtaagagtggcagagttttcggtgatttgacaggtttcttgatgtctctaaaaggtattccaagcacttatgacaaggacatgcaagaagacaaggagcccctatttgactgtttgaccactgttgaacactccatgttgattgctacaggagtgatctccaccttgaccgtcaacaaggaaaagatggaagctgctttaaccatggatatgttagctaccgacttggctgactatttggtcagaaagggtgttccattcagagagactcaccacatttctggtgaatgtgttgccactgccgaaagattgggtttgtccggtattgacaaattgactttggaacaataccaaaagattgactcaaggtttggtcaagatttatttgaaactttcaacttcgaacagagtgtggaaagaagagatgccaccggtggtactgctaagtccgctgttttgaagcaattggacaacttgaaatctcaattgaattaa

SEQ ID NO: 4969 - DNA, 249 bp, Artificial Sequence
  Optimized genes for Saccharomyces cerevisiae
atggttttggttcaagatcttttacatccaactgctgcttctgaagcccgtaagcacaagttgaagactttggtccaaggtccaagatcttacttcttggacgttaagtgtccaggttgtttgaacattaccaccgtcttttcccacgctcaaactgccgttacttgtgaaagttgctcaacagtgttatgtacccctaccggtggtaaggctaaactatccgaaggtacttctttcagaagaaaataa

SEQ ID NO: 4970 - DNA, 186 bp, Artificial Sequence
  Optimized genes for Saccharomyces cerevisiae
atgttttctgagttgattaacttccaaaacgaaggtcacgaatgtcagtgccaatgtggctcctgtaagaacaatgaacaatgtcaaaagtcttgtagttgcccaactggttgtaactctgatgacaagtgtccatgtggtaacaaatctgaagaaaccaagaagtcatgttgttccggtaaataa

SEQ ID NO: 4971 - DNA, 978 bp, Artificial Sequence
  Optimized genes for Saccharomyces cerevisiae
atgaagttcaacttctccaccatttttaatattttgttcttcttattcactttaatcgaagctaactccaacggtgaaaccgtcaagttgattacctctgacggtattgtctactcttatgcagtttataccaagactctagccccagctagagtggttgtcaaaaccatctcctacactacaaccagagtttacccaattactttggccaattccgttgtttcttctaccaccgaaaagatcactgaagtttcaactgtatctgcttctgaacaagtttctgccacccaaactaattctctagtctctacatctactgtttccaccatctctccaactatatcctccggctccagcacttcatcctccagcacctatgatattgaatcttcacaatctattgagtcgtctggtacctcgtctgcaaccgctgaaccttccgcttcctccggtttcagattgaccagcagttctgcgtttgtctcctctactgctccattttcttcccaattgtcctcctcctcatccagtgagacttcctcttcttctttctctacctcctcgagtagtgctcctttgtctttgacttcttctagttcgtcatcaagctcttttgccactatcatcacattggctcccagttcctctaaatctggtaactctcagcttacattagcctccagctcatctacgtctgctgttgaaagttctcaaaccggttctaccattgccagaactacttctactttggttccatcttcctctgtcgacactacatctcgtgctaccacttccatgccattggaatcctcttccactcaatccatttctgtgtcttcatctgatggtacttgttacgttttctacgatgatgacgactactactccacagtctatctgaccaacccatctcaatctgttgatgctgctactaccatcacctcaacaaacactatctacgctactgtcactatttaa

SEQ ID NO: 4972 - DNA, 390 bp, Artificial Sequence
  Optimized genes for Saccharomyces cerevisiae
atgtctacaagctcagtgcgttttgctttcagaagattctggcaatctgaaactggtccaaagaccgtccacttctgggctccaactttgaaatggggtttggtttttgccggtttctccgatatgaagagacctgttgagaaaatctccggcgctcaaaacttgtcgttattgtccactgccttaatctggaccagatggtctttcgtcatcaagccaagaaacattctgcttgcaagtgttaactcctttttgtgtttgactgctggttaccaattgggtagaattgccaactacagaatcagaaatggtgactctatttctcaattatgttcttatattctatctggtgctgatgaatccaagaaggaaattactaccggtcgttaa

SEQ ID NO: 4973 - DNA, 1314 bp, Artificial Sequence
  Optimized genes for Saccharomyces cerevisiae
atggccgtttccaaagtttacgctagatcagtatatgactctagaggtaatccaactgttgaagtcgaattaactaccgaaaagggagttttcagatctattgtcccttccggtgcttccactggtgtccatgaagctttggaaatgcgtgacgaagacaagtctaagtggatgggtaagggtgtcatgaacgctgttaacaacgtcaataacgttattgctgccgcctttgtcaaggctaacttagatgttaaggaccaaaaggctgtcgatgacttcttgttaagtttagacggtactgccaacaagtcgaaactaggcgctaatgctatcttgggcgtgtccatggctgctgcaagagctgctgcggccgaaaagaatgttccattgtaccaacatttggctgatctatcaaagtccaagacttctccatacgttttgccagttccttttttaaatgtcttgaacggtggttcccatgctggtggcgccctggctttgcaagaattcatgattgctccaaccggtgctaagacctttgccgaggctatgagaattggttctgaagtttatcacaacttgaaatctctgaccaagaagagatatggtgcctctgctggtaacgttggtgatgaaggtggtgttgctccaaacatccaaactgctgaagaagcccttgatttgattgttgacgctattaaagctgccggtcacgatggtaaggttaagatcggtttggactgtgcttcttccgagtttttcaaggatggcaagtacgatttggatttcaagaacccagaatctgataaatcaaaatggttgactggtgtagagttagctgacatgtaccactctttgatgaagagatacccaatcgtgagcatcgaggacccattcgctgaagatgattgggaagcttggtctcacttcttcaaaacagcaggtattcagatagtcgctgacgatttaaccgtgacgaatcctgccaggatcgctaccgccattgaaaaaaaggctgctgatgctcttctattgaaggtcaaccaaattggtaccttgagcgaatccatcaaagcagctcaagatagttttgctgcaaactggggtgttatggtttctcatcgttctggtgaaactgaagacactttcattgccgacttggttgtcggtctacgtacaggtcaaatcaagacaggggcacccgccagatccgaaagattggccaagttgaaccaattgttgagaatcgaagaagaattgggtgacaaggccgtctacgccggagaaaacttccaccacggtgacaaattataa

SEQ ID NO: 4974 - DNA, 1470 bp, Artificial Sequence
  Optimized genes for Saccharomyces cerevisiae
atgtctgctgacttcggtttaatcggtttggctgtcatgggtcaaaacttgatcttgaacgctgctgatcatggtttcaccgtttgtgcttacaacagaactcaaagcaaagtagaccacttcctcgcaaatgaagctaagggtaagtccattattggtgctacgtcgattgaagatttcatttccaaattgaagagaccaagaaaggttatgttattggtcaaggccggtgctccagtcgacgctctgatcaaccaaattgtcccattgttagaaaagggtgacatcatcatcgatggtggtaatagtcatttcccagactccaatagaagatacgaagaattgaagaagaaaggtattttgtttgtgggcagcggtgtctccgggggtgaagaaggtgccagatatggtccatctttgatgccaggtggttctgaggaagcttggccacatatcaagaacattttccaatctatctctgccaagagtgatggtgagccatgttgtgaatgggttggtcctgctggtgcaggtcattacgttaagatggttcacaacggtatcgaatacggtgatatgcaattgatctgtgaagcctacgatatcatgaagcgtctaggagggttcactgacaaggaaatttctgatgtttttgcaaagtggaacaatggcgtacttgactctttcttggttgaaatcaccagagacattttaaagttcgatgatgtcgacggtaagccattagtcgaaaaaattatggacactgctggtcaaaagggtactggtaaatggactgccattaatgctttggatttaggtatgccagttactttgattggcgaggccgtgtttgctagatgcttgtccgctttgaaaaacgaaagaatcagagcttccaaggtcttgcccggacctgaagttccaaaggatgctgttaaagacagagaacaatttgtcgatgacttggagcaggcattgtacgcttctaagatcatttcatatgctcaaggtttcatgttgattcgtgaagctgccgccacctatggctggaagctaaacaacccagctattgcccttatgtggagaggtggttgtatcataaggtcagttttcttaggccaaatcaccaaggcttatcgtgaagaaccagatttggaaaacttactattcaacaagttttttgccgatgccgtcactaaggcacagtctggttggagaaaatctattgctttagctacaacatacggtattccaactccagccttttcaaccgctctatccttctacgacggttacagatctgaacgtctgcctgcgaatttgttgcaagctcaaagagattattttggtgctcacactttcagagttttgccagaatgtgcctctgacaacttgcctgttgacaaagatattcacattaactggaccggtcacggtggtaacgtttcctcttccacctaccaagcttaa

SEQ ID NO: 4975 - DNA, 525 bp, Artificial Sequence
  Optimized genes for Saccharomyces cerevisiae
atgtccgctattcctgaaaacgctaacgtcacagtcttgaacaagaacgaaaagaaagccagagaattgattggtaagttgggtttgaagcaaattccaggtatcattcgtgtcaccttcagaaagaaggataaccaaatctatgccattgaaaaaccagaggtgtttagatctgccggtggtaactacgttgtcttcggtgaagctaaggttgacaacttcactcaaaagctagcggctgcacagcaacaagctcaagcttctggtattatgccatcaaatgaagatgttgctaccaagtctccagaagacattcaagctgacatgcaagccgctgccgaaggctccgttaacgcagctgctgaagaagatgacgaagaaggtgaagtcgatgctggtgatttgaataaagacgatatcgagcttgttgttcaacaaactaacgtttccaagaatcaggccatcaaggccttaaaggctcacaacggtgacttagtaaatgctatcatgtctttgagtaaataa

SEQ ID NO: 4976 - DNA, 855 bp, Artificial Sequence
  Optimized genes for Saccharomyces cerevisiae
atggccattgatgctcaaaagttggtcgtagtaattgttattgtggtcgttccattgttgtttaaattcatcatcggccccaagactaaaccagttttagacccaaagagaaacgatttccaatctttcccattagttgaaaagaccattttgactcacaacacttccatgtacaagttcggtctacctcacgctgatgatgttttgggtttgccaattggtcaacacattgtcatcaaggccaacatcaacggtaaggatatcaccagatcttacactccaacttctttggatggtgacacaaaaggtaattttgaattactggtcaagtcctatccaacaggaaatgtctctaaaatgattggtgaactaaaaataggcgatagtatccaaatcaagggtccaagaggtaactaccattatgagcgtaactgtcgttcgcatttaggtatgatcgccggtggtactggtattgctccaatgtatcagatcatgaaggctattgctatggatccacatgacactactaaggtcagcctagtgtttggtaacgttcacgaagaagatattcttttgaagaaggaattggaagctttggttgccatgaaaccttctcaattcaagatcgtctactacttggactcacctgacagagaggactggaccggtggtgttggttacattaccaaggacgtcattaaagaacacttgccagctgctaccatggacaatgttcaaattttaatctgtggtccacctgcaatggttgcttctgttagaagatccaccgtcgatttgggtttcagaaggtccaagccattgtctaagatggaagaccaagtttttgttttctaa

SEQ ID NO: 4977 - DNA, 366 bp, Artificial Sequence
  Optimized genes for Saccharomyces cerevisiae
atggctcaaagagttactttcagaagaagaaacccttataatacaagatctaacaagatcaaggttgtcaaaaccccaggtggtatcttgagagcccaacatgttaagaaactagccaccagaccaaagtgtggtgactgtggcagtgcattgcaaggtatttctactttacgtccaagacaatacgctactgtttcaaagactcacaagaccgtttccagagcttacggtggttctcgttgcgccaactgtgttaaggaaagaatcgtcagagcttttttgattgaagaacaaaagattgtcaagaaggtcgtgaaagagcagactgaagctgctaagaagtctgaaaagaaatccaagaaataa

SEQ ID NO: 4978 - DNA, 600 bp, Artificial Sequence
  Optimized genes for Saccharomyces cerevisiae
atgtctgttgaaccagttgtcgttattgatggtaagggtcacttggttggtcgtttggcttctgtcgtagcaaaacaattgttgaacggtcaaaagattgttgtcgtcagagctgaagaattgaatatttctggtgaattcttcagaaacaaattgaaatatcatgactttttgagaaaggctactgctttcaacaagaccagaggtccattccatttccgtgctccatccagaatcttttacaaggccctacgtggaatggtttcccacaagactgccagaggcaaagccgctttggaaagattgaaggtctttgaaggtatccctccaccttatgacaagaagaaaagagttgtggttccacaagctttgagagtcttaaggcttaagccaggtagaaagtacactaccttgggtaagctatctacatccgtcggttggaaatacgaagatgtcgttgccaagctggaggccaagagaaaagtgagcagtgctgaatactacgctaagaagagagccttcactaagaaggttgcatctgctaacgctaccgctgctgagtcagatgttgctaagcaattagctgccttaggttactaa

SEQ ID NO: 4979 - DNA, 5277 bp, Artificial Sequence
  Optimized genes for Saccharomyces cerevisiae
atgaaggtttccgatcgtagaaagttcgaaaaagccaacttcgacgaatttgaatctgccttgaacaacaagaacgacttggtccactgtccatctataacattattcgaatccattccaactgaagtcagatctttttacgaagatgaaaagtccggtttaatcaaggttgttaaattcagaaccggtgctatggacagaaagagatcctttgaaaaggttgtcatctctgttatggttggcaaaaatgtgaagaagttcttgacttttgttgaagatgaaccagatttccagggtggtccaatcccatccaagtatttgattccaaagaagattaatttgatggtctacaccctgttccaagtacacactttaaagtttaacagaaaagactacgacactttgtccctcttctaccttaacagaggttactacaacgaattgtctttcagagtcttagagcgttgtcacgaaattgccagtgctagaccaaatgactcatccaccatgcgtacattcaccgacttcgtttctggtgctccaattgtaagatctttgcaaaagtctaccattagaaagtacggttacaatctagctccatacatgttcttgttgttacatgttgacgagttatccatcttctccgcttaccaagcttcattgcctggtgaaaagaaagttgatacagaaagattgaagagagatttatgcccaagaaagccaattgaaattaaatacttttcccaaatctgtaacgacatgatgaacaagaaggatagattgggtgacattttgcacattatcttgagagcctgcgctttgaactttggtgccggtcctagaggtggtgctggtgacgaagaagatagatcaattaccaacgaagagccgatcattccttccgtagacgaacacggtttgaaggtctgtaaattgagatctccaaatactccaagaagactgaggaaaaccctggacgctgtcaaggctttattggtctcctcttgtgcttgtactgctcgggatttggatattttcgatgacaataacggtgttgccatgtggaagtggattaagatcttgtaccatgaagtcgcccaagaaactactttgaaggactcttatagaatcactttggttccttcttccgatggtatttccttgctagcttttgctggtccacaaagaaatgtttacgttgacgacaccactcgaaggatccaattatacactgattataacaagaatggttcctctgaacctcgtctaaagaccttagatggcttgacatccgactatgttttctacttcgtcactgtcctaagacaaatgcagatttgtgccttaggtaactcatatgatgccttcaaccatgacccatggatggatgttgttggtttcgaagacccaaaccaagttaccaacagagacatttctagaattgttttgtactcttacatgtttttgaacaccgctaagggatgtttggttgaatatgctactttcagacaatacatgagagaattgccaaagaacgcacctcaaaagttgaattttagagaaatgagacaaggtttaattgctttgggtagacattgtgtcggttctagattcgaaactgacttatatgaatctgctacctccgaattgatggccaaccactctgtccaaactggtcgtaacatctacggtgtcgactccttttctttgacctccgtttctggtactacggctaccttgttacaagaaagagcttccgagagatggattcaatggttgggtttagaatctgattaccactgttccttcagctctaccagaaacgcggaagacgtcgttgccggtgaagccgcttcttctaatcatcatcaaaagatctctcgtgttactcgtaagcgtccaagagagccaaaatccaccaacgatatcttagtcgctggccaaaagttgtttgggtcctcatttgaattcagagatttgcaccaattgagactctgttatgaaatctacatggctgacactccttctgttgctgttcaagccccaccaggttatggtaagaccgaattattccacttaccattgatagcattagcttctaagggtgatgttgaatatgtctctttcttatttgtgccctatactgttttgttggctaactgtatgatcagactaggtagatgtggctgcttaaacgttgctcctgttagaaatttcattgaagaaggttacgatggtgttactgacctttacgtcggtatttacgatgacttggcatccactaacttcactgacagaattgctgcttgggagaacattgttgaatgtaccttccgtacgaacaacgtcaaattaggatacttgattgtcgatgaattccacaactttgagactgaagtttatcgtcaatctcagttcggtggaataaccaacttggattttgatgctttcgagaaggccatttttctatcgggtactgctcccgaagctgtcgcagacgctgcactacaacgtattggtctaaccgggctagccaagaagtccatggatatcaatgaattgaaacgcagtgaagacttgagtcgtggtttgtcttcttacccaaccagaatgttcaacttgatcaaagaaaaatctgaggttcccttaggtcacgttcataaaatcagaaagaaggttgaaagtcaaccagaagaagcgttgaagcttcttttggctcttttcgaatctgaaccagaaagcaaggctatcgttgttgcatctaccacaaacgaagtagaggaattagcttgctcttggagaaagtacttccgtgtcgtctggatccatggtaagttgggcgctgctgaaaaggtctcaagaactaaggaatttgtcaccgatggatcgatgcaagtcttgatcggtaccaaactggtcactgaaggtatcgatatcaagcaattgatgatggttatcatgctagataacagattgaatattattgagttgattcaaggtgttggtagattacgtgatggtggtttgtgttacttgttgagcagaaagaactcctgggctgccagaaacaggaagggcgaattgccacctatcaaggaaggttgcattactgaacaagtgcgtgaattctatgggttggaatccaagaagggtaagaaaggtcaacatgtgggttgttgtggttctaggactgatctatctgctgataccgtcgaacttatcgaaagaatggaccgtttggccgaaaagcaagctacagcttcaatgtctattgtcgctttgccatcatctttccaagagtcgaatagctcagacagatacagaaagtactgttcttctgacgaagattctaacacttgtattcacggttcggctaacgcctctacaaacgcctccaccaacgccatcaccactgcatcgaccaatgttcgtactaacgctacgactaatgcaagtactaacgctacaaccaatgcgtcaaccaatgcttctaccaacgccacgaccaatgcctcgactaacgctactaccaactcttcaactaatgccaccaccactgctagtacgaacgttagaacctctgctactacaacggcttctatcaacgtcagaacttccgctaccaccactgaatctacaaattcatccactaatgcaaccactactgaatccactaactcttctactaacgcaactactaccgaatccactaattctaacacttccgccactactaccgcttccatcaacgtgagaacttctgccacaacaactgaatcaacgaacagctctacttcagcgactaccactgcttctataaacgtaaggacctctgctactactaccaagagtattaactcttcgacaaatgctactaccaccgagtctactaactctaataccaacgctacaactactgagagcacaaactccagtacaaacgctaccaccaccgaatctaccaacagtagcactaacgctaccactaccgaaagtaccaactccaacacatcagccgccaccactgaatctaccaactccaacacttctgctactactacagagtccactaatgcctctgccaaggaagatgctaataaggacggtaatgctgaagacaaccgtttccatccagtcacagacatcaacaaagaaagttacaaaagaaagggttctcaaatggtcttgttggaaagaaaaaagttaaaagctcaattcccaaacaccagcgaaaacatgaatgtccttcaatttttaggttttaggagtgatgaaattaagcatttgttcttgtacggtattgacatttatttctgtcctgaaggcgttttcactcaatacggactatgtaagggttgtcaaaagatgtttgaattgtgtgtttgttgggctggtcaaaaagtgtcctacagaagaatcgcttgggaagcccttgccgtcgaacgtatgttgagaaacgatgaagaatacaaggagtatttggaggatattgaaccatatcatggtgatccagttggttacttgaaatactttagcgttaagagaagagaaatctattctcaaatccaaagaaactacgcttggtacttagctattactagaagaagggaaaccatctccgtcttggactccacaagaggtaaacaaggttcccaagtttttagaatgtccggcagacaaatcaaggaactatacttcaaggtctggtccaatttaagagaatctaagactgaagttttgcaatatttcttgaactgggatgagaaaaaatgccaagaagaatgggaagctaaggatgatactgtggtagtggaagctttggaaaaaggtggtgtcttccaaagattgcgttctatgacttctgctggtttgcagggcccacagtacgttaagttgcaattctctagacaccacagacagttgagaagccgttacgaactgtcacttggtatgcacttgagagaccaaattgcattgggtgtaaccccatctaaagttccacattggactgcctttttgtccatgttgattggtttgttctacaacaagactttcagacagaaattggaatacctgctagaacaaatttctgaagtttggctactgcctcactggttagacctagcaaacgttgaggtgttggctgctgacgatactagagttccattgtatatgttaatggttgccgttcacaaggaattggactctgatgatgtcccagacggtagatttgacatcctgttatgtagagattcctcccgtgaagttggtgaataa

SEQ ID NO: 4980 - DNA, 2049 bp, Artificial Sequence
  Optimized genes for Saccharomyces cerevisiae
atgttcttcaacagattgtctgctggtaaactgttggttcctttgtccgttgtgttatatgctctttttgttgtcattttgcctttgcaaaactctttccactcttccaacgtcctggtacgtggtgctgacgacgtggaaaactacggtactgttattggcatagacttgggtactacttactcttgtgtcgctgttatgaagaacggtaagactgaaatcttagcaaacgaacaaggtaaccgtataacaccatcttacgttgccttcactgatgatgaaagattaattggtgatgcggccaagaaccaagttgcagctaaccctcagaacactattttcgacatcaagagactaatcggtttgaagtacaacgacagatctgttcaaaaggatatcaagcacttgccattcaatgttgttaacaaggacggtaaaccagccgtcgaagtctctgtcaagggtgaaaaaaaggttttcaccccagaagaaatctccggtatgatccttgggaagatgaagcaaatcgctgaagactatttgggtaccaaggtgacgcatgctgtcgtcactgtccctgcttacttcaacgatgctcaaagacaagccactaaggacgctggtaccattgccggtttgaacgttttgagaatcgttaatgaaccaactgctgccgcaattgcttatggtttagacaagagtgataaggaacaccaaatcattgtttatgatttgggtggtggaaccttcgatgtttctttgctaagtatcgaaaacggtgtctttgaggttcaagctacttctggtgacactcacctgggtggtgaggactttgactacaagattgtcagacaattgattaaggctttcaagaaaaagcatggtattgacgtttccgacaataacaaagctttggctaagttgaagagagaagctgaaaaggctaaaagggccttatcttctcaaatgtctactaggattgaaattgactcattcgttgacggtatcgatttatcagagacattgaccagagctaagtttgaagaattgaatttggatttgttcaaaaagaccttgaagccagttgaaaaagttctacaagattccggcttagaaaagaaggatgttgatgacattgttttagttggtgggagcacaagaattccaaaggtccaacaattattggaatcctattttgatggtaagaaggccagcaaaggtatcaacccagatgaagccgttgcgtatggtgctgctgtgcaggccggcgtactttcaggtgaagaaggtgtagaggatattgtccttctagacgtaaatgctttgactttaggaattgaaaccactggtggtgtcatgactccattgatcaaacgtaacaccgctattcccacaaagaagtcccagatcttctccaccgccgtcgataatcaaccaaccgtcatgattaaggtctacgaaggtgaacgtgctatgtccaaagataacaacttgttgggtaagttcgaattgaccggtatcccaccagctccaagaggtgttccacaaattgaagttactttcgctttagatgctaatggcatcttgaaagtgagtgctaccgataaaggaacaggtaagtctgagtctattaccatcactaatgacaagggtagattgactcaagaagaaattgatagaatggttgaagaagcagaaaagtttgcttctgaagacgcttccatcaaggcaaaggttgagtcgagaaacaagttggaaaattacgctcactccctcaaaaaccaagtcaatggtgacctaggtgaaaagctagaagaggaggacaaagaaactttgttggatgccgccaacgatgtcttggaatggttggacgacaacttcgaaacggccattgctgaagattttgacgagaaatttgaatctttatcgaaggttgcttacccaatcacctcaaaattgtacggtggtgcagatggttctggtgccgctgattacgatgacgaagatgaagacgatgatggcgactactttgaacatgacgaattataa

SEQ ID NO: 4981 - DNA, 999 bp, Artificial Sequence
  Optimized genes for Saccharomyces cerevisiae
atgatcagaattgctattaatggtttcggtcgtattggtagattggttttgagattagctttgcaaagaaaggatatcgaagttgttgccgtcaacgatccttttatctctaacgactatgccgcttacatggttaagtatgattcaacccacggtaggtacaagggcacagtttcccacgatgacaagcacatcattattgatggtgtgaagatcgccacttaccaagaaagagatccagctaacttgccatggggttctttgaagattgacgtcgctgtcgactccaccggtgttttcaaggaattggacactgctcaaaagcatatcgatgccggtgctaagaaggttgtgataacagcgccctcttctagtgctccaatgtttgtcgtcggtgtcaatcataccaagtacactccagacaaaaaaattgtcagtaatgcttcctgtaccaccaactgtttggccccattggctaaagttattaacgatgccttcggcattgaagaaggtttgatgaccactgtccactccatgactgctactcagaaaacggtagacggtccatctcataaggactggagaggtggtagaactgcctctggtaacatcatcccttccagcacaggagcagccaaggccgttggtaaggtcctaccagaattacaaggtaaactaactggtatggctttcagagttccaaccgtcgatgtttctgttgttgatttgactgttaaacttgagaaagaagctacctatgaccaaatcaagaaggcagtgaaagctgctgctgaaggtcctatgaagggtgttttagggtatactgaagacgctgttgtatcgtccgattttttaggtgatactcacgcctcaattttcgatgcttctgctggtattcaattgtctccaaagttcgtcaagttgatttcttggtacgacaacgaatacggttactctgcacgtgtcgttgacctgatcgagtacgttgctaaggcttaa

SEQ ID NO: 4982 - DNA, 900 bp, Artificial Sequence
  Optimized genes for Saccharomyces cerevisiae
atgaagttgtctaaactatctattttgaccagtgcgctggcaacctccgctttagccgctccagctgtggtcaccgttactgaacatgctcacgaagctgctgtcgtcactgttcaaggtgttgtctacgttgaaaacggtcaaaccagaactacctacgagactcttgcacccgcaagcactgctactccaacttcaacggccactgccttggttgccccaccagttgctccttcctccgcctcttctaactccgatgttgtattatctgctttgaagaacctagcttccgtctggggtaagaccactgattcgaccacaacattaacttcttctgaatctacttcccaatctttggcccaggccaccacgacctcaaccccagctgccgccagcaccactagtacacctgcagctaccactaccacctctcaagctgctgctacaagctctgcctcctcttccgactctgacttgagtgactttgcttcatccgttttggctgaacacaacaagaagagagctttgcacaaggacactcctgcgttgtcctggtctgatactttagcttcttacgctcaagactacgctgacaactatgactgttctggtactttgactcattctggcggcccatacggtgagaacttggccttgggttacgatggtccagccgctgttgatgcttggtacaacgaaatctctaattatgatttctccaacccaggtttctcttcaaatactggtcatttcactcaagttgtttggaaatcgacaacccaagtcggatgcggtatcaagacttgtggtggtgcttggggtgattatgtgatttgttcctacgacccagctggtaactacgaaggtgaatatgctgataatgtcgaaccattggcttaa

SEQ ID NO: 4983 - DNA, 6645 bp, Artificial Sequence
  Optimized genes for Saccharomyces cerevisiae
atggctaccattgctccaacagctccaatcaccccaccaatggaatctactggtgacagattagttaccctggaattgaaagatggcaccgtgttacaaggttactccttcggtgctgaaaagtccgttgctggcgagcttgtcttccaaactggtatggtaggttatccagaatcagtcactgacccttcttatgaaggtcaaatactagtcatcacctaccccttggttggtaactacggtgttccagacatgcacttgagagatgagttggtcgaagaattgccaagatactttgaatccaaccgtattcatattgctggtttggttatttcccattacacagacgaatactctcactacttggctaagtcttctttgggtaagtggttgcagaacgaaggtattccagcggtttatggtgttgacactagaagtttgaccaagcacttgagagacgctggttctatgttgggcagattgtccttggaaaaatccggttccgacagaacaatatcccgttcttcttcttggagatcagcatttgacgttccagaatgggttgatccaaacgttcaaaatttggtttccaaggtttccatcaacgaacctaaactgtacgttccaccagctgataacaagcatatcgaactacaaactggaccagatggtaaagttttgagaatcttggctatcgatgttggtatgaaatacaaccaaattagatgtttcatcaagagaggtgttgaattgaaggttgttccatggaattacgatttcaccaaagaagactatgacggtttgttcatcagtaatggcccaggtgacccatctgttttggacgatctttcccaaagattgtctaatgtcttggaagctaagaagacccctgttttcggtatctgtttgggtcatcaattgattgctagagctgccggtgcctccactttgaagcttaagtttggtaatagaggtcacaacatcccatgtacctccactatctctggtcgttgttatattacttctcaaaaccacggtttcgccgttgatgtcgatactttgacttctggctggaagccattatttgttaacgccaacgatgattctaacgaaggtatctaccacagtgaattaccatatttctctgttcaattccatccagagtcgacacctggtccacgtgacactgaattcttgtttgatgtgtttatccaagctgtcaaggaatttaagtacactcaagtcttgaagcctattgctttcccaggtggattgctagaagacaacgtcaaggctcatccaagaatcgaagccaagaaggttctcgttttgggtagtggaggtttatctattggtcaagctggtgaattcgattattccggttctcaagctatcaaagccttgaaggaagaaggtatatatacgattttgattaatccaaatattgctacaattcaaacctctaagggtctagctgacaaggtctacttcgttcctgttactgctgaatttgttagaaaagtgatattgcacgaaagaccagatgctatttacgttactttcggtggtcaaactgctttgtcagtcggtatcgctatgaaggatgaatttgaagctttaggtgtcaaggttttgggtactccaattgatactatcatcactacagaagatagggagctgttttccaacgctattgacgaaatcaacgaaaagtgtgctaaatctcaagctgctaactctgtcgacgaagctttggctgcggtgaaagaaattggtttcccagttatcgtgcgtgctgcttacgccttgggtggtttgggctctggttttgccaacaacgagaaagaattggtcgacttgtgcaatgttgctttctccagctctcctcaagttttggtggaaaagtcgatgaagggttggaaggaagtcgagtacgaagtggttcgtgatgctttcgacaactgtatcactgtttgtaatatggaaaacttcgatcctttgggtattcacactggtgactccatcgttgttgctccttcccagactttgtccgatgaagactacaacatgttaaggactaccgctgtcaatgtcatcagacacttaggtgttgtcggcgaatgtaacatccaatacgctctaaacccagttagcaaggactactgcattattgaagtcaacgccagattgagcaggtcttctgctttggcttccaaggctactggttatccattagcttacactgcagctaaactagggttgaatatcccccttaacgaagttaagaattctgttaccaagtccacctgtgcctgcttcgaaccatccctagactattgtgttgtcaagatgccaagatgggatctgaagaaattcactcgtgtcagtacagagttatcctcttccatgaaatcagttggtgaagtcatgtctattggaagaacttttgaggaagctattcaaaaggcaatcagaagcactgaatatgctaacttggggttcaatgaaactgacttagacattgatattgactacgagttgaacaatccaactgatatgagagtttttgccattgccaatgcttttgctaaaaaaggttactctgttgacaaggtctgggaaatgacgcgcattgacaaatggttcttgaacaagctacacgatttggttcaatttgcagaaaaaatttctagtttcggtacaaaggaagaacttccatccttggtactccgtcaagcaaaacaattaggattcgacgatagacaaatcgcccgttttttggactcaaacgaagttgctattagaagattaagaaaggaatacgggatcacaccatttgtcaagcaaatcgacaccgtggctgctgaattccctgcctacaccaactatttgtacatgacttacaacgctgacagccatgacctctctttcgatgaccatggtgttatggtcttaggttctggtgtttacagaattggctcgagcgttgagtttgactggtgtgcagtcactgccgtcagaactttaagagcaaacaacatcaagacaattatggttaactacaatcctgaaactgtttcaaccgattacgatgaagcagaccgtttatacttcgaaaccatcaatctagagagagtgttggatatctatgaaatcgagaacagttctggtgttgtagtctccatgggtggccaaacatcgaacaacattgccatgaccttacacagagaaaacgttaagatcctaggtacttcccctgacatgattgactctgctgaaaatcgttacaagttctcaagaatgttggaccaaattggtgtggaccagccagcttggaaagaattgacatcaatggacgaggctgaatcttttgccgagaaggtcggttacccagtattagtaagaccatcgtatgtcttgagtggtgccgctatgaacactgtttactctaagaacgacttggaatcgtacttgaaccaggctgttgaagtttctagagattacccagttgtcataaccaagtacatcgaaaatgccaaggaaattgaaatggatgctgttgccagaaacggtgaattagtgatgcatgtcgtttccgaacacgttgaaaacgcaggtgtccattctggtgatgctactcttattgtcccaccacaagacttggctccagaaactgtcgatcgtatagttgttgctactgctaagatcggtaaggctttaaagatcaccggtccatacaatattcaattcattgctaaggataatgaaatcaaggtcattgaatgtaacgtacgcgcctctagatctttcccattcatttctaaagtagttggcgttaacttaattgagctggccactaaggctatcatgggtcttcccctaactccataccctgtcgaaaagttgcctgatgattacgtcgctgttaaagtcccacagttctctttccccagactagctggtgctgatccagtcctgggtgtagaaatggcatctaccggtgaggttgccacctttggtcactccaaatacgaagcttatctaaagagcctcttggcaaccggtttcaagttgccaaagaagaacatcttgttgtctatcggttcttacaaagaaaagcaagagttactatcttccgtacaaaagctatataacatgggttacaagttgttcgctacctcaggtactgctgactttttaagcgaacatgggatagctgtccaatatttagaagttttgaacaaagacgatgacgaccaaaagtctgaatattctttgacccaacatttggctaataatgagatcgatctatacattaacttgccatctgctaacagattcagaagacctgcttcttacgtatccaagggctataagaccagaaggctggctgttgattactcagtaccacttgttactaacgttaagtgcgctaagttattgatcgaggcaatctctcgtaacatcactttggatgtttctgaaagagacgctcaaacctcccacagaaccattactttgccaggtttgattaacattgccacttacgtccctaatgcttctcatgttattaagggtccagctgagctaaaggaaaccactcgattattcttggaaagtgggtttacttattgccaattgatgccacggagcatctccggtcctgttattactgatgtcgcatctttgaaggctgctaactccgtgagccaagactcctcctacaccgacttctcctttaccatcgccggtaccgcccacaacgctcactcagtgacccagtcagcatccaaagtcaccgcattgtttttgccattgcgtgaattgaaaaacaagattaccgctgtcgctgaactattaaaccaatggccaaccgaaaaacaggtcattgcagaggccaagactgccgacttggcgtctgtcctgttgttaacctctttgcaaaacagatctatccacattacaggtgtctctaacaaggaagatttggcgttgatcatgactgtcaaagctaaggacccaagagttacatgtgatgtcaacatttattcattgtttattgctcaagatgattatccggaagctgttttcttaccaacgaaggaagatcaagaattcttctggaacaacttggatagtatcgacgccttttctgtcggtgctttgccggttgctttggccaacgtcaccggtaacaaggtggatgttggtatgggtatcaaggactctctaccattgcttttagccgccgttgaagaaggtaaattgactattgacgacatcgttctaaggttgcacgacaacccagccaaaatcttcaacattccaacccaggattccgtcgttgaaattgatttggactactcattcagaagaaacaaacgttggtctccattcaacaaggatatgaatggtggtattgaaagagtcgtctacaacggtgaaacgctggttttaagcggtgaactggtgtctccaggtgctaaaggtaagtgtattgttaacccaagtccagcttccattacggcttctgccgaattgcaatctacttccgctaaaagaagattttcgattactgaagaagccattgccgataacttggatgcggcggaggatgccattcctgaacaaccattggaacaaaaattaatgtccagtcgtcctccaagagaattggttgccccaggcgccatccaaaacttaatcagatccaataaccctttccgtggtagacatattttaagtattaagcaattcaagagatctgatttccacgttcttttcgctgtggcccaagaattaagagctgccgtcgccagggaaggtgtcttagatttgatgaagggacatgttatcactactattttctttgaaccatctacaagaacttgttcttcgtttattgctgctatggaacgtttgggtggtagaattgtcaatgtgaacccattggtctcatctgtaaagaagggtgaaacattgcaagataccatcaggaccttggcttgttactccgatgccatcgtcatgcgtcactctgaagaaatgtctgttcatatcgctgcaaagtattctcccgttccaattatcaatggtggtaacggttccagagaacacccaactcaagccttcctagatttattcactatcagagaagagattggtaccgtcaacggtattaccgttaccttcatgggtgatttgaagcacggtagaaccgttcactctttatgtagattgttgatgcactaccaagttagaatcaatttagtctcccctcccgaattgagattaccggagggtttaagagaagaattgagaaaggccggcctgcttggtgtcgaatccattgaattgactccacacatcatttcaaagactgacgtcttgtactgtactagagtccaagaagaaagattcaactccccagaagaatacgctagattgaaggacacctacattgttgacaataagattttggcccatgctaaggaaaacatggccattatgcatccattgccaagagttaatgaaattaaagaggaagttgactatgatcatagagctgcttactttagacaaatgaagtacggtttgttcgtcagaatggctcttttggccatggttatgggagtagacatgtaa

SEQ ID NO: 4984 - DNA, 264 bp, Artificial Sequence
  Optimized genes for Saccharomyces cerevisiae
atggaaaacgacaagggtcaattagttgaattgtacgttccaagaaagtgttctgccaccaataggattatcaaggctgatgaccacgcttctgttcaaatcaacgtggccaaggttgacgaagaaggtagagctattccaggtgaatacattacttacgctttgtcaggctatgtcagatccagaggtgagagtgatgattctttgaacagattggctcaaaacgatggtttactaaaaaatgtctggtcttactcccgttaa

SEQ ID NO: 4985 - DNA, 1188 bp, Artificial Sequence
  Optimized genes for Saccharomyces cerevisiae
atgtctgaaggtatcacagatatcgaagaatctcaaattcaaaccaactacgacaaggtcgtgtataaatttgatgacatggaattggatgaaaatctattaagaggtgtcttcggttacggtttcgaagaaccatctgccatccagcaaagagctatcatgcctatcatcgagggtcatgatgtcttggcacaagcccaatctggtactggtaagaccgggactttctccatcgctgctttacagaggattgacacttctgttaaggctccacaagcattgatgcttgccccaaccagagaactagccttgcaaatccaaaaggttgttatggctttggctttccacatggacataaaagtacatgcttgtatcggtggtaccagtttcgtcgaagacgctgaaggtttgcgtgatgctcaaattgttgtcggtactccaggtagagtttttgacaacatccaaagacgtagatttagaactgacaaaatcaagatgtttattttagacgaagctgatgaaatgttgtcctccggattcaaggaacaaatctaccaaatcttcactttgttgccaccaactacccaagttgtactattgtctgctactatgccaaacgatgttttggaagttaccactaagttcatgagaaacccagttagaatcttggtcaagaaggacgagttaactttagaaggtattaagcaattttatgtcaatgtggaggaggaggaatacaagtacgaatgtttgactgatctatatgactccattagcgtcactcaagctgttattttctgcaacactagaagaaaagttgaagaattaaccaccaagttgagaaatgataaattcacagtgtcggccatttactccgatcttcctcaacaagaaagagacaccattatgaaggaattcagatccggttcttctcgtattttgatttctacagacttgctcgccagaggtattgatgttcaacaagtcagtctggtcatcaactacgatttgccagctaacaaagaaaactatattcacagaattggtaggggcggccgttttggtagaaagggtgttgctattaactttgttactaatgaagatgttggtgctatgcgtgaattggaaaagttctactcaacgcagattgaagaactgccctcagacattgctaccttattgaactaa

SEQ ID NO: 4986 - DNA, 402 bp, Artificial Sequence
  Optimized genes for Saccharomyces cerevisiae
atggatcgtgaccacattaatgatcatgaccacagaatgtcttactctatcaacaaagatgatttgctattaatggttttggccgtgtttattccacctgtcgcagtctggaagagaaagggtatgttcaacagagatacattattgaacttgttgttgtttctacttctgttcttcccagccattatccatgcttgttacgttgtttacgaaacttcatctgaaagatcttatgacttatccagacgtcacgctactgctccagccgtcgacagagacttggaagcccatcctgctgaagaatcccaagctcaaccaccagcttacgatgaggacgatgaagctggtgctgatgttccattgatggacaacaagcaacaattgtccagcggtagaacctaa

SEQ ID NO: 4987 - DNA, 555 bp, Artificial Sequence
  Optimized genes for Saccharomyces cerevisiae
atggctagatacggtgctacttccaccaacccagccaaatctgcctctgctcgtggttcttacttgagagtttctttcaagaacaccagagaaaccgcacaagccatcaacggttgggaattaacaaaggctcaaaaatatttggaccaagttctagatcatcagcgtgccattccattcagaagattcaattcatctatcggcaggactgctcaaggtaaggaatttggtgttactaaagccagatggccagctaaaagtgtcaagtttgtccaaggacttttgcaaaacgctgctgctaatgctgaggcaaagggtttggatgccaccaagttgtacgtttcccacattcaagtcaaccaagctccaaagcaacgtagaagaacttacagagctcacggtagaattaacaagtatgaatcttctccttcccatatcgaattggttgtcactgaaaaagaagaagctgttgctaaggccgctgaaaagaaggtggtaagattaacaagcagacaaagaggtcgtattgctgcccaaaagagaatctccgcttaa

SEQ ID NO: 4988 - DNA, 156 bp, Artificial Sequence
  Optimized genes for Saccharomyces cerevisiae
atggctgctcaaaaatctttcagaatcaagcaaaagatggccaaggctaagaagcaaaacagaccattgccacaatggatcagattaagaaccaacaacactattcgttacaatgcaaagagaagaaactggagacgtactaaaatgaacatttaa

SEQ ID NO: 4989 - DNA, 393 bp, Artificial Sequence
  Optimized genes for Saccharomyces cerevisiae
atgactagatccagtgtgctagcagatgctttaaatgccatcaacaatgctgagaaaaccggtaagagacaagttttgattagaccttcttccaaggttatcatcaagttcttgcaagtcatgcaaaagcacggttacattggtgaatttgaatacatcgatgatcatcgttcaggcaaaattgttgttcaattgaacggtagattaaacaagtgtggtgttatttctccaagattcaacgtcaaaatcggtgacattgaaaagtggactgccaacttgttgccagctcgtcagtttggatatgtcattttgaccacttctgctggtattatggaccacgaagaagctagaagaaagcatgtttctggtaagatcttgggtttcgtctactaa

SEQ ID NO: 4990 - DNA, 999 bp, Artificial Sequence
  Optimized genes for Saccharomyces cerevisiae
atggttagggtcgctatcaacggtttcggtagaatcggcagattggttatgagaattgccttgcaaagaaagaacgttgaagtcgtggctttgaacgacccatttatcagtaatgactactctgcttacatgttcaaatatgactccactcacggtcgttatgctggtgaagtttctcacgatgacaagcacattattgttgacggtcataagatcgccactttccaagaaagagatccagctaatttaccatgggcttccctaaacattgatattgctattgactctactggcgttttcaaggagttggacactgctcaaaaacatatcgatgccggtgctaagaaggttgtcattactgcaccctcaagcacagcacctatgtttgtcatgggtgtcaatgaggaaaagtacacctctgatttgaagattgtctcaaatgcgtcttgtaccaccaactgtttggctccattggccaaagttattaacgatgcttttggtattgaagaaggtttgatgactaccgttcattccatgacggctactcaaaagaccgtagatggtccttcccacaaggactggagaggtggtcgtactgcctctggtaacatcatcccatcttctaccggtgccgccaaggctgtcggtaaagtcttgccagaattacaaggtaagttgacaggtatggctttcagagttccaactgttgatgtttccgtggtcgatctaacagtaaaattgaacaaggaaaccacttacgatgaaatcaagaaggtcgttaaggccgctgctgaaggtaagttaaagggtgttttaggttacactgaagatgctgttgttagctcggatttcttgggtgactccaactcctctatttttgacgctgccgcaggtatccagctttctccaaagttcgttaaactggtctcttggtacgacaacgaatacggttatagtaccagagtggtcgacttggtcgaacacgttgctaaagcttaa

SEQ ID NO: 4991 - DNA, 1758 bp, Artificial Sequence
  Optimized genes for Saccharomyces cerevisiae
atgggtttgctgacaaaggttgccacttccagacaattctccactaccagatgtgtcgccaagaaattgaataaatactcttacatcatcaccgaaccaaagggtcaaggtgcttctcaagctatgttatacgctaccggtttcaagaaggaagatttcaagaaacctcaagttggtgtgggctcatgttggtggtctggcaacccatgtaacatgcaccttttggacttgaacaaccgttgctcccaatccattgaaaaggctggtctaaaggccatgcaatttaatacaataggggtctctgacggtatttccatgggaacgaaaggaatgagatattctttgcaatctagggagataattgccgactcctttgaaaccattatgatggctcaacactacgatgccaatattgctattccatcgtgcgacaagaatatgccaggtgttatgatggctatgggtagacacaacagaccatctatcatggtttatggtggtactattttgccaggtcatccaacttgtggttcctctaagatctccaagaacatcgatattgtttccgctttccaatcatatggtgaatacattagcaagcagttcactgaagaggagagagaagacgttgttgaacatgcttgtccaggcccgggttcttgtggtggtatgtacaccgccaacaccatggccagtgctgctgaagttttaggcctaactatcccaaactccagctctttcccagctgtttctaaagaaaaattggctgaatgtgataacattggtgaatatatcaaaaagaccatggaattgggtatcttaccaagagacattttaaccaaggaggcctttgaaaacgccattacttacgttgtagctactggtggttctaccaacgctgtcttgcatctagtagcagtcgctcactccgccggtgtcaagttgtctccagatgactttcagagaatttctgataccactccattgattggtgactttaagccttccggtaagtacgtcatggctgatttaatcaacgtcggtggtactcaaagtgtcattaagtacttgtatgaaaataacatgttgcacggtaacactatgactgtcacaggtgacactttggccgaacgtgctaagaaggctcccagtttacctgaaggtcaagaaattatcaagccattatctcacccaattaaagctaacggtcacttgcaaatcttgtacggtagtctcgcacccggaggggcggtcggtaaaattaccggtaaggaaggtacctacttcaaaggtagagctagagttttcgaagaagaaggtgccttcatcgaagccttggaaagaggtgaaatcaagaagggtgagaagactgttgtcgttatcagatacgaaggtcctcgtggtgctcctggtatgccagaaatgttgaagccatcttctgctttgatgggttacggtttaggtaaggatgttgcattgttgactgacggcagattctctggtggctctcatggttttttgatcggacatatcgttccagaagctgcagagggtggtccaatcggtttggtcagagatggtgatgaaatcattattgatgcagacaacaacaagattgacctactggtgtcagataaggaaatggcccaaagaaagcaatcttgggttgctccaccacctcgttacactagaggtacactttcgaaatatgctaaattagtgtcaaatgcttccaatggttgtgttttggatgcttaa

SEQ ID NO: 4992 - DNA, 534 bp, Artificial Sequence
  Optimized genes for Saccharomyces cerevisiae
atgttcaacaccaccccaattaatatcgataaatggttaaaagagaatgaaggtttgttgaagccacctgttaacaactattgtttgcacaagggcggtttcactgtcatgatcgtcggtggtccaaacgagcgtaccggttaccatatcaacccaactccagaatggttctaccaaaagaagggttccatgcttctgaaagtagttgatgaaactgatgctgaaccaaagtttattgacattatcattaacgaaggtgactcctacttattgccaggtaacgttcctcattctccagttagattcgccgacactgttggtattgtcgtggaacaagatcgtcctggtggtgaaaatgacaagatcagatggtactgttcacattgtagacaagttgtccacgaatctgaattgcaaatgttggacttgggtacacaggtcaaggaagctattttggattttgaaaacgatgttgaaaagagaacttgtttccactgcaagaccctaaattatgctagaccacaatctaactaa

SEQ ID NO: 4993 - DNA, 936 bp, Artificial Sequence
  Optimized genes for Saccharomyces cerevisiae
atgtctgtgagtgccgccccagctattccacaatactctgtttctgactacatgaagtttgctttggccggtgccattggttgtggttcaacccattcttccatggtccccatcgatgtcgtcaagactagaattcaattagagcctactgtttataataagggtatggttggttctttcaaacaaattattgccggtgaaggtgctggcgcattactaactggttttggtcctacgcttttgggttattccatccaaggtgctttcaagttcggtggttacgaagttttcaaaaaattcttcatcgacaacttgggttacgataccgcttccagatacaagaactccgtatatatgggttctgctgctatggctgaattcttggctgatatcgctttatgtccattggaagctaccagaatccgtctagtctctcaacctcaatttgccaacggtttagtcggtggatttagcaggatcttgaaagaagaaggtatcggtagtttttactccggtttcactccaattttgttcaagcaaatcccatacaacattgctaaatttttggtctttgaaagagcttcggagttctactacggtttcgctggtccaaaggaaaagttgtcttctacttccactactttgttgaatctgctatctggtttgactgctggtttggctgccgcaatagtttcccaaccagccgacactttattgtccaaggttaacaagaccaagaaggctccaggtcaatctaccgttggcctccttgcacagttagctaagcaattgggattctttggctcattcgcggggttgccaacaagattggttatggttggtaccttaacttctttgcaattcggtatttatggttccttgaagagcacactgggctgcccaccaaccattgaaattggtggtggtggtcactaa

SEQ ID NO: 4994 - DNA, 318 bp, Artificial Sequence
  Optimized genes for Saccharomyces cerevisiae
atggaacatccagcttacactttgtctttgttgaccactgctggtggtttgatgggttactacagaaagggttctattccatctttagtttctggtttggttttcggttccgtttacggtattgctggatatctattgcacatgaacagagatggtggcttggaaatggctttgggtgctagcacactattattaggtgccggtgtcatcagaggtatgccatcccgttttaccaagccagttccagtggtcttgactgcccttggtggtctgggctcatactattattacaataaatacaaggaattctacccttaa

SEQ ID NO: 4995 - DNA, 279 bp, Artificial Sequence
  Optimized genes for Saccharomyces cerevisiae
atggctaagagaaccaagaaggttggtattactggtaagtacggtgtccgttatggctcctctttgagaagacaagtcaagaagttggaaattcaacaacacgctagatacgactgttctttctgtggtaaaaagactgttaaaagaggtgccgctggtatctggacttgttcatgctgtaagaaaacagtggccggtggtgcttacaccgtttccactgctgctgcagccactgtcagatctaccatcaggcgtttaagagaaatggttgaagcttaa

SEQ ID NO: 4996 - DNA, 465 bp, Artificial Sequence
  Optimized genes for Saccharomyces cerevisiae
atggttcaagccgttgctgttttgaagggcgatgccggtgtctccggtgttgttaaatttgaacaagcttcagagtctgaaccaaccactgtctcttacgaaattgctggtaactcccctaatgctgaaagaggtttccatatccatgaattcggtgatgctacaaacggttgtgtttctgccggtccacatttcaacccatttaagaagacccacggtgctccaactgacgaagttagacacgttggtgacatgggtaacgtcaagactgatgaaaacggagtggccaagggttctttcaaggactctttgatcaagttgatcggtcctaccagcgtagtcggtcgttccgtcgtcattcacgctggtcaagatgatttgggtaaaggtgacactgaagaaagtctaaaaactggtaatgcaggcccaagaccagcttgtggtgttattggtttaaccaactaa

SEQ ID NO: 4997 - DNA, 1023 bp, Artificial Sequence
  Optimized genes for Saccharomyces cerevisiae
atgaccgctccattggtcgttcttggtaacccattgctagatttccaagctgatgtcactgctgaatatttggctaagtactctttgaaggaaaatgatgctatcttggtggatgccaagtctggtgacgctaagatggccatctttgacgaattgttgcaaatgccagaaaccaagttggttgctgggggcgcagcgcagaatacagctagaggtgccgcttacgttttaggtgctggtcaagttgtctacttcggttctgtcggtaaggacaaattttcagaaagattgttaaatgaaaacgaaaaggctggtgttaaatccatgtaccaagtccaaaacgatatcggtactggaaagtgtgctgctttgatcactggtcacaacagatctttagttactgacttgggtgctgctaatttcttcacacctgaccacctagacaagcactgggatctggttgaggctgccaaattattctacattggtggttttcatttgactgtctccccagacgctattgttaagctcggccaacatgcgaaagaaaactccaagccttttgttttgaacttttctgccccattcatcccccatgttttcaaggatgctcttgccagagttttgccatacgctaccgtcattattgctaacgaatctgaagcagaggccttctgcgatgctttccaattggactgtgccaacaccgatttagaagccatagctcaacgtattgtgaaagattctccagttgaaaagaccgttattttcactcacggtgtcgaaccaactgttgtagtcagttcaaaaggtacctctacttatcctgtaaagccattagactcttccaagattgtcgacaccaacggtgcaggtgatgcctttgccggtggtttcatggctggtttgacgaagggtgaagatttggaaacttccattgacatgggtcaatggttagctgcactatctatccaagaagttggtccatcttacccatccgagaagatctcgtatagcaaataa

SEQ ID NO: 4998 - DNA, 678 bp, Artificial Sequence
  Optimized genes for Saccharomyces cerevisiae
atgtctgacacagaagctccagttgaagttcaagaagactttgaagtggtcgaagagtttacacctgttgttttggctacccctattccagaagaagtccaacaagcccaaactgaaatcaaattgttcaacaaatggtctttcgaagaagtagaggtcaaggatgccagtctagtcgactatgtgcaagtcagacaaccaattttcgttgctcacactgctggtagatacgccaacaagagattcagaaaggctcaatgtccaatcattgaaaggcttaccaactctttgatgatgaatggcagaaacaacggtaagaagttgaaggccgttagaatcatcaagcatactttggatattatcaacgttttaaccgaccaaaacccaattcaagttgtcgttgatgctatcaccaatactggtccaagagaagataccactcgtgttggtggaggtggtgccgcacgtcgtcaggctgttgacgtctctccattgagaagagtcaaccaagctatagctttgttgactattggtgctagagaggccgctttccgtaatatcaagaccattgctgaaactttagcagaagaattaattaatgctgctaagggttcatccacttcctacgctattaagaaaaaagatgaattggaaagagttgccaagtccaacagataa

SEQ ID NO: 4999 - DNA, 1080 bp, Artificial Sequence
  Optimized genes for Saccharomyces cerevisiae
atgtctaccaaggttgtcaacgttgctgttattggtgcgggggtggtaggaagtgctttcttggaccaattgttggctatgaagtctacgataacttacaacttggtcttgttagctgaagccgaaagatctcttatttccaaggatttctcaccattgaatgtgggctccgactggaaagctgctttggcagcaagtaccactaaaacattgccattagatgatttgatcgctcacttgaagacctcgcctaaaccagttattttggttgacaacacttcttctgcttacattgccggtttctacaccaagttcgtcgagaatggcatctccatcgccactccaaacaagaaggcctttagcagtgatctggccacctggaaggctttattttctaacaagccaactaacggttttgtttatcacgaagctaccgtcggtgctggtttgcctatcatctctttcctacgtgaaattattcaaactggtgacgaggtagagaagattgaaggtattttctccggtactttgtcttacatcttcaacgaattttccacctctcaagctaacgatgtgaaattttcagatgttgttaaggtcgctaagaaattgggttacactgaaccagacccaagagatgacctgaatggtctagatgtcgccagaaaggttactattgttggtagaatttctggtgttgaagttgaatctccaacctcctttcccgttcaatctttgattccaaagcctctagaatccgtcaagtccgctgacgaattcttggaaaaacttagcgactacgacaaggacttgactcagttgaagaaggaagctgctacagaaaacaaagttttgagattcatcggtaaggtcgacgttgccacaaaatctgtttccgttggtatcgaaaagtacgattattctcatccattcgcttctttaaagggttctgataatgtcatttcaatcaagactaagcgttataccaacccagtcgtcatccaaggtgcaggtgctggtgccgctgtcactgctgccggtgtcttaggtgatgttatcaaaattgctcaaagattataa

SEQ ID NO: 5000 - DNA, 786 bp, Artificial Sequence
  Optimized genes for Saccharomyces cerevisiae
atggctagaggtccaaagaagcacttgaagagattagctgctccacatcattggttgttggacaagctttctggttgttatgccccaagaccttcagcaggacctcacaagttgagagaatccttaccattgattgtcttcttgcgtaacagactaaagtacgctttgaatggtagggaagtcaaggctatcttgatgcaaagacacgttaaggttgatggtaaagttagaacagacaccacttacccagctggtttcatggatgttattactttggatgctactaatgaaaacttcagattggtctacgatgtcaagggcagatttgccgtccacagaattacagatgaagaggcctcttacaagctagggaaagtaaagaaggtccaattgggtaagaaaggtgttccatatgttgtcacccatgatggtcgtaccatcagatatcctgacccaaatatcaaggttaacgacactgttaaaattgacttggcatccggtaagatcactgattttatcaaattcgatgccggtaaactggtttacgttactggtggtagaaacttaggtagaatcggtaccattgtgcataaggaacgtcacgacggtggttttgatttggtgcacatcaaggactctctagacaacactttcgttaccagattgaacaacgttttcgtcattggtgaacagggcaagccatacatttctttgccaaagggtaagggtattaaattaagtattgctgaagaaagagaccgtagaagagctcaacaaggtttataa

SEQ ID NO: 5001 - DNA, 609 bp, Artificial Sequence
  Optimized genes for Saccharomyces cerevisiae
atggctactaatatcacctggcatccaaacttgacttacgatgaaagaaaagcattacgtaagcaagatggttgtaccatttggttgaccggcctgtcagcatccggtaagtctactattgcttgtgctttggaacaattgctattgcaaaagaatctatctgcttataggttggacggtgacaacattagattcggtttaaacaaggatttgggtttctccgaaaaggacagaaacgaaaacatcagaagaatcagtgaagtttctaaactttttgctgattcttgcgccatttccatcacatcctttattagcccttacagagtggatcgtgaccgtgccagagagttgcacaaggaggctggtttgaagttcattgaaattttcgtcgatgttccattggaggttgctgaacagagagacccaaagggtttgtacaagaaggctagagaaggtgtcatcaaggaattcactggtatctctgccccatacgaagctcctaaagctccagaattacatttgagaactgaccaaaaaaccgttgaagaatgtgccactatcatctatgaatacttgatttctgaaaaaattataagaaagcacttataa

SEQ ID NO: 5002 - DNA, 417 bp, Artificial Sequence
  Optimized genes for Saccharomyces cerevisiae
atgtctacagactccatcgtaaaagcttctaactggagattggtcgaagttggtagagttgtcctaatcaagaagggtcaatctgctggtaagttggcagccattgttgaaatcattgaccaaaaaaaggtcttgattgatggtccaaaggccggtgttcctagacaagctatcaatctgggccaggtcgtgcttaccccattgacctttgctttaccaagaggtgctcgtactgccactgtttccaagaaatgggccgccgctgctgtttgtgaaaagtgggctgcatcaagttgggctaaaaaaattgctcaaagagaaagaagagctgccttaaccgatttcgagcgtttccaagttatggttttgagaaagcaaaagagatacactgtcaagaaggctttggctaaggcttaa

SEQ ID NO: 5003 - DNA, 504 bp, Artificial Sequence
  Optimized genes for Saccharomyces cerevisiae
atgatcatttacaaggacattttctccaatgatgaattgttatctgatgcttacgatgccaaattagtggatgatgttatttatgaagctgactgtgccatggtcaatgttggtggtgacaacatcgatattggtgccaacccatctgctgaaggtggtgatgacgacgttgaagagggcgcagaaatggttaacaacgttgtccactctttcagattgcaacaaactgctttcgacaagaaatcatttttgacctacatcaagggttacatgaaggctgtcaaagccaagctacaagaaaccaaccctgaggaagttccaaagtttgaaaaaggtgctcaaacatatgtcaagaaggtcatcggtagtttcaaggattgggaattcttcactggtgaatccatggacccagacgctatggttgttatgttgaactacagagaagatggtactaccccatttgttgctatctggaagcatggtattgtcgaagaaaagatttaa

SEQ ID NO: 5004 - DNA, 1080 bp, Artificial Sequence
  Optimized genes for Saccharomyces cerevisiae
atgggtgttgaacaaatcttgaagagaaagacaggcgtaatcgtcggtgaagatgtccacaacttgttcacttacgctaaggagcacaagttcgctattcctgctatcaacgtcacttctagtagcactgctgttgctgctttggaagccgctagagactctaagtctccaattattttgcaaacgtcgaatggtggtgctgcttattttgctggtaagggtatctccaacgagggtcaaaacgcctccatcaagggcgccattgctgcggctcactacatcagatctatcgctccagcttacggtattccagtcgtgctacattctgatcattgtgccaagaagttgttgccatggttcgatggtatgctagaagctgacgaagcatatttcaaggaacacggtgaaccattgttttcctcccacatgttggatttgtctgaagaaaccgatgaagaaaatatttctacttgtgttaaatacttcaaaagaatggctgccatggaccaatggttagaaatggaaatcggtataaccggcggggaggaagacggtgtcaacaacgaaaacgctgataaagaggatttatacaccaaacccgagcaagtttataatgtttacaaggctttacatccaatctcaccaaacttctccattgcagcagctttcggtaactgtcacggtttgtatgccggtgacattgccctacgtcctgaaattcttgctgaacatcaaaagtacactagagaacaggtgggttgtaaagaagaaaaacctttatttttggttttccatggtggttctggttccactgttcaagaattccacacaggaattgacaacggtgttgtcaaggtcaatttggacactgattgccaatacgcctatttgactggtattagggattacgttttgaacaagaaggactacattatgtctccagttggtaacccagaaggtccagaaaagccaaataagaaattttttgacccaagagtctgggttcgtgaaggtgaaaagaccatgggtgccaaaatcaccaagtcactggaaactttcagaaccaccaacactttataa

SEQ ID NO: 5005 - DNA, 1005 bp, Artificial Sequence
  Optimized genes for Saccharomyces cerevisiae
atgctttcccgtgtggccaaaagagctttctccagcacggtagccaacccttacaaggttaccgttttaggtgctggtggtggtattggtcaaccattgtctttgttattgaaattaaaccacaaggtcaccgacttgagattgtatgacttaaagggtgctaagggcgtggccactgatctatctcacatcccaaccaactccgttgtcaagggtttcactccagaagaaccagacggtttgaacaacgcactaaaggacaccgatatggttttgattcctgctggtgttccaagaaagccaggtatgactagggatgatctgtttgctatcaacgccagtattgtcagagatttggctgccgctactgctgaatctgctccaaacgctgctattttggttatttcaaatcctgtcaactctaccgtcccaattgttgctcaagttctaaagaacaagggtgtttacaacccaaagaaacttttcggtgtcactacattggactctatcagagcagctagattcattagtgaagttgaaaacactgacccaactcaagaaagagttaatgtcattggcggtcactctggtatcaccatcatacccttgatctctcagactaatcataaattgatgtctgatgacaagagacacgaattaattcacagaattcaatttggtggtgacgaagtcgttaaggctaaaaatggtgcgggatccgctaccttgtccatggctcatgccggtgccaagttcgctaatgctgtcctcagcgggttcaaaggtgaacgtgatgttatcgagccatctttcgtcgattctccattattcaagtccgaaggtatcgaattctttgcctcgcctgtaacattgggtccagatggtattgaaaagatccatccaatcggtgaattgtcatctgaagaggaggaaatgttgcaaaagtgtaaggaaactttgaagaagaacattgaaaaaggcgttaactttgttgcttccaaataa

SEQ ID NO: 5006 - DNA, 597 bp, Artificial Sequence
  Optimized genes for Saccharomyces cerevisiae
atgtctgctatgatggtcaaattaggtttgaataaatccgctttgttactcaagccatctgccttttcacgtgctgctgccctgtccagctctagaagattgctattcaacaccgcacgtaccaacttcttgtccacttctccattgaagaacgttgcttctgaaatgaatactaaggctgccattgctgaagaacaaattttgaacaagcaaagagctaagagaccaatttcacctcacttaacaatttaccaaccacagttaacctggtacttatcgtccttgcacagaatttctttggtcttgatgggtttgggtttttatttattcaccatcttgttcggtgttagtggactactaggccttgggcttacaactgaaaaagtttccaactggtatcatcaaaagttctccaagatcaccgagtggtctatcaagggttctttcgcatatttgtttgccatccattacggtggtgctatcagacacttgatttgggatactgccaaggaattgactttgaaaggtgtctacagaactggttacgctctgatcggtttcactgctgttttgggtacttacttgttgaccttataa

SEQ ID NO: 5007 - DNA, 744 bp, Artificial Sequence
  Optimized genes for Saccharomyces cerevisiae
atgccaaagcttgttttggtcagacacggtcaatctgaatggaacgaaaagaacttgttcactggttgggttgacgtaaaattgtctgctaaaggccaacaagaagccgccagggcaggggaattgttgaaggaaaagaaggtttatccagacgtgttatatacaagcaaactgtccagagctatccaaactgccaacattgccctagagaaagctgaccgtttatggattccagttaacagatcttggagattgaatgagcgtcattatggtgacttgcagggaaaggacaaggctgaaactttgaaaaagttcggtgaagaaaaattcaacacctacagaagatcatttgatgttccaccacctccaattgatgcctcgtctccattctctcaaaagggtgatgaaagatacaagtacgttgatccaaatgtcttgcccgagactgaatccttggctttggttattgacagattactaccttactggcaagatgtcattgctaaggatttgctatctggtaagaccgtcatgatcgcggctcatggtaactctttgagaggtttagtcaagcacttggaaggtatcagtgatgctgatatcgccaagttgaacatcccaaccggtattccattggtctttgaattagacgaaaatttaaagccatccaagccttcctactacttggacccagaagctgccgctgctggtgctgcagctgttgctaaccaaggtaagaaataa

SEQ ID NO: 5008 - DNA, 249 bp, Artificial Sequence
  Optimized genes for Saccharomyces cerevisiae
atggttttggttcaagatctattacatccaactgctgcctccgaagctcgtaagcacaagttgaagactcttgtccaaggtccaagatcatactttttggacgtcaagtgtccaggttgtttgaacatcaccactgttttctctcacgctcaaacagccgtgacttgtgaaagttgctccaccattttgtgtacccctaccggtggtaaggctaaattatctgaaggtacttctttcagaagaaaataa

SEQ ID NO: 5009 - DNA, 1026 bp, Artificial Sequence
  Optimized genes for Saccharomyces cerevisiae
atgcaatacaagaagtccttagttgcttctgctttggttgctacctctttggctgcttatgctccaaaggacccatggtccactttaaccccctccgctacttataaaggtggtattaccgactactcttcaactttcggtattgccgttgaaccaattgctacaacagcctcttccaaggccaagagagctgccgctatctctcaaatcggtgacggacaaattcaagctaccacaaaaactactgctgccgctgtctcccaaattggtgacggtcaaattcaagcaaccactaagactaaggctgctgctgtatcacaaataggtgatggccaaatccaagctaccactaaaaccacttctgctaagaccacggcagcagccgtcagtcaaatcggggatggtcaaatccaggccacgacaaagaccaaggctgcggctgtgtcgcaaatcggtgatggccaaattcaagcgactaccaaaacaactgccgccgctgtttcccagatcggcgatggtcaaattcaagctactacaaaaaccactgctgctgcagtctctcagataggagacggtcaaatccaagctactaccaacactactgttgcacctgtcagccagattactgatggtcaaatccaagccactaccttgaccagtgccaccattattccatctccagctcctgctccaatcaccaatggtaccgatccagttaccgctgaaacttgtaagtcttctggtactttggaaatgaacttgaagggtggtatcttgactgacggtaagggtcgtattggttctattgttgccaacagacaattccaatttgatggtccaccacctcaagctggtgctatttacgctgccggttggtctatcactccagaaggtaatctagccatcggtgaccaagatactttttaccaatgcctttccggtaacttctacaacttatacgatgagcacattggtactcaatgtaatgctgtccatttgcaagccattgacttgttgaactgttaa

SEQ ID NO: 5010 - DNA, 555 bp, Artificial Sequence
  Optimized genes for Saccharomyces cerevisiae
atggctcgttacggtgctacaagcaccaacccagctaaatctgcttctgccagaggttcttacttaagagtttctttcaagaacaccagagaaactgctcaagccatcaatggttgggaattgaccaaggctcagaagtacttggaacaagttttggaccatcaaagagccattccattcagaagattcaactccagtattggtagaaccgcacaaggtaaggagtttggtgtaacgaaagctagatggccagccaagtccgtcaagtttgttcaaggccttttgcaaaacgctgccgccaatgctgaggctaagggtttggatgctactaaactatatgtctctcatatccaagtcaaccaagctccaaagcaacgtaggagaacttacagagctcacggtcgtatcaacaagtatgaatcttcaccttcccacattgaattagttgtcactgaaaaagaagaagctgtggcaaaagccgctgaaaagaaggttgttagattgacttccagacaaagaggaagaatcgcagcccaaaagagaattgctgcttaa

SEQ ID NO: 5011 - DNA, 1284 bp, Artificial Sequence
  Optimized genes for Saccharomyces cerevisiae
atgagaaagtgcaagatctttgttggtaactctcatccagaactaggtaacatggtttgccaaagattggggattgaaccagctccatgtaccctcaagaagtttgccaacggagaaacttctgttcaaatcggtgtctccgtcagagacgaggatgtttacgttattcaatctggttccccctctatcaatgatgatatcatggaactactgattttggtgtcagcttgtagaggtggtagtgcccgtaaaattacagcggtcatccctcaattcccatactctaagcaatgtaagatgaagagacatcgtggtgctatcactgccagaatgttagctaacttgttggttatggctggtgctgaccacgttgtcagtatggacttacatgcttctcaaatgcaaggtttcttcaccaagccagtcgataatttatatggtggtccatctttggctaaatggattcgtgaaaacgttgaagactatgaagatgctgttgttgtttccaagaatcctggcggtactaaaagagttacagctctggcagactccttgaaaatcaacttcgccatgattcacactgaccgtaggaggtcaaaggacttgtattcgcagaacaaggatttgcaacaattgaagttgcgtaaacagtccatgttgagaaagaacagaccaattattagacaaggtgatcacccaaacgaagaggagaacatcattttatcaaatggtatccaaactgctagaatcagaaacggtcacgtaattggtgatgatgaagctgatgacgatgaagatgccattcttgaatctgactctgaattgcactccatcgacggtttggattcccatggtttaggtggtacctacgacgcagtggacagcgaagacgaagaagaaattccagttttgtacagagaacaattaatcacccttgtgggcaatgttagaggtagatctgctattatcttggacgacatgatcgacagacctggatctttcatttccgctgctgaacacttggtccaaaactgtggtgccaagaaggtctacgtcgttgctacccacggtattttcactggtgactgtttggaggaattggaaaagtctgatgccatcgataccattgttgtaacgaacacttacccaatatccggtgaaagaattgctggcagcaagaaattagtcactattgatgtctctccaatcttcgcagaatgtatcagaagagatcattacggtgaatccatttctgtcttgtttgatagtctagccgctttgtaa

SEQ ID NO: 5012 - DNA, 1098 bp, Artificial Sequence
  Optimized genes for Saccharomyces cerevisiae
atgaaattaagtgctttgttggccctgtcagcttccaccgctgttttggctgcccctgccgttcaccactccgacaaccatcatcacaacgacaagagagctgtcgtcactgtcacccaatacgttaatgctgatggtgctgtcgttattccagctgctaccactgctacttccgcagccgctgacggtaaagtggagagtgttgctgccgccactactaccttatcttccactgctgcagctgcgacaacatctgctgcagcctccagctcaagttcttcatcgtcgagctcatcttccagctcttctgttggtagtggtgattttgaagacggtaccatttcttgttccgatttcccatccggtcagggtgccgtctctttggactggttgggtttaggtggttgggcttctatcatggacatgaacggtaacactgccacatcatgtcaagatggttactattgctcttacgcttgttctccaggttatgctaagactcaatggccaagtgaacaaccatctgatggtcgttccgtgggtggtttgtactgtaagaacggtaagctttacagatctaacaccgacaccaactccttgtgtgttgaaggtcaaggttccgctcaagctgttaacaaggtttccggctccattgctatctgtggtactgactacccaggctctgaaaacatggttgttccaactgttgtcggtgctggttcttctcaacctatcaacgttatcaaggaagattcttattaccaatggcaaggtaagaagacctctgcccaatattatgtcaacaacgctggagtatctgtcgaggatggctgtatctggggtactgaaggttccggtgtcggtaactgggctccagtcgtgctaggcgctggttacactgatggtattacttacttgtctattattcctaatcccaataataaagaagctccaaacttcaacattaagatcgttgccaccgatggaagcacggtaaatggggcatgctcctacgaaaatggtgtttactctgggtctggttctgacggttgtaccgtctccgttacttctggttcagccaactttgttttctactaa

SEQ ID NO: 5013 - DNA, 264 bp, Artificial Sequence
  Optimized genes for Saccharomyces cerevisiae
atggaaaacgacaagggtcaattggttgaattatatgttccaagaaagtgttcagcaactaatagaattatcaaggctgatgatcacgcttccgtccaaatcaatgtggccaaagttgacgaagaaggtagagctattccaggtgaatacgtcacctacgccctatctggttacgttagatctcgtggcgagagtgatgactctttgaacagattggctcaaaacgatggtttgttgaagaacgtctggtcttactcccgttaa

SEQ ID NO: 5014 - DNA, 1920 bp, Artificial Sequence
  Optimized genes for Saccharomyces cerevisiae
atgtccaaggctgttggtatcgatctaggtaccacctactcttgtgttgctcacttctcaaacgacagagttgatatcattgctaatgaccaaggtaacagaactactccatctttcgtcggtttcactgatactgaaagattgattggtgacgcggccaagaaccaagccgctatgaaccccgccaacactgttttcgatgcaaagcgtttgatcggtagaaacttcaacgatccagaagtccaaggtgacatgaagcatttcccattcaagttaattgatgtcgacggtaagccacagatacaggttgaatttaaaggtgaaacaaagaatttcaccccagaacaaatctcctccatggtcttgggtaaaatgaaagaaactgccgaatcctacttgggtgcgaaagttaacgatgctgttgttaccgttcctgcttattttaatgattcccaaagacaagctactaaggacgccggtactatcgctggtctaaatgttctaagaatcatcaacgaaccaactgctgctgccattgcctatggtttggacaaaaagggtaaggaagaacacgttttgattttcgacctgggtggtggcacatttgacgtttccctccttagcattgaagatggtatcttcgaagtcaaggccaccgctggggacactcacttgggcggtgaagattttgataatagattagtcaaccattttattcaagaattcaagagaaagaataagaaggacttaagtaccaatcaaagagctttgagaagattgcgtacagcttgtgaaagagctaagagaaccttgtccagctctgctcaaacttctgttgaaattgactctttatttgaaggtattgacttctacacttccatcacccgtgccagatttgaagaactgtgcgctgacttgtttaggagtactttggacccagtcgagaaggtcttaagagacgctaaactagacaagtcacaagtcgatgaaatcgtattagtgggtggttctaccagaattccaaaggttcaaaagttggtcacagactacttcaatggtaaggagccaaacagatctatcaatccagatgaagccgtcgcttacggtgccgccgtacaagctgctatcttgaccggtgatgagtcttctaaaactcaagatttgttgttgttagatgtggcaccattgtctttgggaatcgaaacggccggtggggtcatgactaaacttattccaaggaactctacaattcctacgaagaaatccgaagtattctccacttacgctgataaccaaccaggtgtcctaatccaagtttttgagggtgagagagccaagactaaagacaacaacttgcttggcaaattcgaattaagtggcatcccaccagctccaagaggtgttccacaaattgaagttactttcgatgttgactccaacggtattttgaacgtttctgccgtggaaaagggtactggtaagtctaacaagatcactattaccaacgacaagggccgtttatctaaggaagacattgagaagatggttgcagaggctgaaaagttcaaagaggaagacgaaaaagaatctcaacgtattgcttccaagaaccaattagaatcgattgcatattcattgaaaaacaccatctctgaagctggagataaattggaacaggcagataaggatgctgtcaccaagaaggctgaagaaaccattgcttggttggattcaaataccactgctaccaaggaagagtttgacgatcaattgaaggaattgcaagaagttgctaacccaattatgtctaagttgtaccaagctggtggtgctcctgaaggtgctgctccaggtggattccctggtggtgcacctcctgccccggaagctgaaggtccaaccgtcgaagaagtggattaa

SEQ ID NO: 5015 - DNA, 801 bp, Artificial Sequence
  Optimized genes for Saccharomyces cerevisiae
atgttgaatgtgctattgagaagaaaggctttctgtttggtcaccaagaagggtatggctactgccactaccgccgctgctacccatactccaagattgaagactttcaaggtttacagatggaatcctgatgaaccatctgctaagccacatttacagtcttaccaagttgacttgaacgactgtggtccaatggtcttggatgctttgttgaagattaaagacgagcaagatagtacactaacgttcagaaggtcttgtagagaaggtatctgcggttcttgcgccatgaatattggtggtagaaacactttggcttgtatctgtaagatcgatcaaaacgaatccaagcaattgaaaatctacccattacctcacatgtttattgtcaaggacttagttccagatttgaccaacttctaccaacaatacaagtctattcaaccatacttgcaaagatcttctttcccaaaggatggtactgaagttctccagtccattgaagatcgtaagaagttggacggtttatatgaatgtattttgtgtgcctgctgttcaaccagctgtccatcctactggtggaaccaagaacaatatttaggacccgctgttttgatgcaagcatatcgttggttgattgactccagagaccaagctacaaaaactagaaaagctatgctgaacaactccatgtctttgtaccgttgtcacactatcatgaactgtaccagaacttgtcctaaaggcttaaacccaggtcttgccatagctgaaatcaagaaatcacttgcatttgcttaa

SEQ ID NO: 5016 - DNA, 771 bp, Artificial Sequence
  Optimized genes for Saccharomyces cerevisiae
atggctccaggtaagaaagttgctcctgccccatttggtgctaagtccacaaagagcaataaggctaagaatcctttaactcactctactccaaagaacttcggtattggtcaagctgtccaaccaaaaaggaacttgtcccgttatgtcaaatggccagaatacgttcgtttgcaaagacaaaaaaagatcttatccatcagattgaaggttccaccaaccatcgctcaattccaatacactttggacagaaataccgctgctgaaactttcaagttgttcaacaaatacagacccgagactgctgccgaaaagaaagaaagattaaccaaggaagctgctgccattgctgaaggtaaatccaagcaagatgcctctccaaagccatacgctgttaagtacggtttgaaccacgttgtttctttgatcgaaaacaagaaggcaaaattagtcttgattgccaacgatgttgacccaattgaattggttgtcttcttgccagctttgtgtaaaaaaatgggtgtcccttatgctattatcaagggtaaggctagactaggcacacttgtcaaccaaaagacctcagcggtggccgcacttactgaagttagagctgaggacgaagccgccttggctaaactggtaagtaccattgatgctaactttgctgataagtacgatgaagtcaagaagcattggggtggtggaatattgggtaacaaggcccaggcaaagatggacaagagagccaagacttctgactctgcttaa

SEQ ID NO: 5017 - DNA, 432 bp, Artificial Sequence
  Optimized genes for Saccharomyces cerevisiae
atgtctaggtctggtgttgccgtagctgacgaatctttgactgctttcaacgatttgaagttgggtaagaagtacaagttcatcctttttggcttaaatgatgctaagactgaaatcgtggtcaaggaaaccagcaccgacccatcttacgacgcctttctagagaaattgccagaaaacgactgtttgtacgctatttatgattttgaatacgaaattaatggtaacgaaggtaaacgttcgaaaattgttttcttcacttggtctccagacactgcccctgtcagatccaagatggtttatgcttcctctaaggacgcattaagaagagctttgaacggtgtcagtacagatgttcaaggtaccgatttctctgaagtttcatacgattccgtcttggaaagagtttccagaggtgctggttcccactaa

SEQ ID NO: 5018 - DNA, 3618 bp, Artificial Sequence
  Optimized genes for Saccharomyces cerevisiae
atgcgtaccttcaccgatttcgtctctggtgctccaattgtccgttctttgcaaaaatctactatcagaagatatggttataacttggctccacacatgtttttgttattgcatgtcgacgaactttctattttctctgcttaccaagcttctctacctggtgaaaagaaggttgacactgaaagattgaagagagatttgtgcccaagaaagccaatcgaaatcaaatacttctcacaaatctgtaacgacatgatgaacaaaaaagaccgtttgggtgacgttctagccactgctcaaagaatcagacgtcgttacaataagaacggttcatctgaaccaagattgaagactttggatggattgaccagtgagagatggatccaatggttaggactcgaaagtgactaccattgttctttcagctctaccagaaacgctgaagatgttgtcgcaggtgaggcagcatcttctgaccacgatcaaaagatctccagagttaccagaaagagaccaagagaaccaaagtcaacaaacgatattttggttgccggtcaaaagttgttcggttcttccttcgaattcagagatttgcaccaattaagattgtgtcacgaaatctatatggctgataccccatctgtagcagttcaagccccaccaggttacggtaagactgagctgttccacttgccattgattgccctggcttccaagggtgacgtcaaatatgtttctttcttgttcgttccatacactgtccttttggctaactgtatgattagattgggtcgttgcggttgtttgaatgtggctccagttagaaacttcattgaagaaggttgtgatggtgtcactgacttgtatgtcggtatctacgatgacctagctagcaccaattttaccgacagaattgctgcttgggaaaacatcgttgaatgtactttcagaactaacaacgttaagctgggatatttgattgttgatgaatttcacaactttgaaactgaagtttacagacaatctcaatttggtggtattaccaacttagattttgatgcttttgagaaggccatttttttatccggtactgcgccggaagctgttgctgacgctgccttgcaaaggattggtttgactggtttagccaagaagtctatggacattaacgaattaaaaagatctgaggatctatcgcgtggtttgtcttcctacccaactagaatgttcaacttgataaaagaaaagtccgaagtgcctttaggtcacgtccacaagatttggaagaaagtggaatctcaaccagaagaagctttaaaattgcttctcgctttgtttgaaattgaacctgaatccaaggctattgtcgttgcttctactacaaatgaagtcgaggaactggcttgttcttggagaaagtactttagagttgtttggattcacggtaagttaggcgctgctgaaaaggtttcaagaactaaggagtttgttactgacggttccatgagagtcttgatcggtaccaagctagtgactgaagggatcgatatcaagcaattaatgatggttatcatgttagacaacagattaaacattatcgagttgattcaaggcgtgggtagattacgtgatggtggtttgtgctacttgttgagcagaaaaaattcctgggccgctagaaacagaaagggtgaattgccacctatcaaggaaggttgtatcactgaacaagttagagaattctacggtcttgaatcaaagaaaggtaagaagggtcaacacgttggctgttgtggttcccgtacagacttaagtgctgacaccgttgaattgatcgaacgtatggatcgtcttgctgaaaagcaagctactgcctctatgtccatagtagctttgccctcatcgttccaagaatccaattcttctgatagatgccgcaagtactgttccagtgatgaagacagcaacacttgtattcatggctctgccaatgctagcactaatgctactacgaactcctccaccaacgccaccacaactgcaagcaccaatgtcagaacctccgctactactaccgcttccattaacgtcagaactagtgccactaccacagagtcgactaatagtagcaccaacgctaccaccacggcatccacgaatgtaagaacctctgctaccactaccgcctccatcaacgtgcgtacttccgccacaacaaccgagtctaccaactccaacacctcagcgactacgacagaatctactgattctaacacatcagcaaccactactgaaagtaccgattcaaatacatctgctacaaccaccgcttccactaactcttcaactaatgctaccactactgcttctacaaactcttctactaacgcaactaccaccgaatccactaatgcctcggctaaagaagatgccaacaaggacggtaacgccgaagacaaccgtttccatccagtcaccgacatcaacaaggaatcttacaagcgtaagggctcccaaatggtcctgttggaaagaaagaagttgaaagctcaattcccaaacacttctgaaaacatgaatgtgctgcagtttttgggtttcagatccgacgaaattaagcatttattcttgtatggtattgacatttatttctgtccagaaggtgttttcactcaatatgggctatgtaagggatgccaaaagatgttcggtttatgtgtttgttgggctggtcagaaggtctcctatagaagaatggcctgggaagccttagctgtcgaaagaatgttgagaaatgatgaagaatataaggaatacttagaagatattgagccatatcatggtgatcctgttggttacttgaagttcttctctgtcaagagaggtgaaatttactctcagatccaaagaaactacgcttggtacttggcaattactagaagaagagaaaccatttctgttttggacagtacaagaggtaaacaaggttctcaagtctttaggatgtctggccgtcaaattaaagagttatactacaaggtctggtctaacctaagggaatctaagaccgaagttttgcagtacttcttgaactgggatgagaaaaagtgtcgtgaagaatgggaggctaaggatgatactgtttttgtcgaagctttggaaaaagtcggtgtcttccaaagacttaggtccatgacttctgctggtttgcaaggtccacaatacgttaaattacaattctccagacatcacagacaattgagatctagatacgaattgtccttgggtatgcatttgagagaccaattggccctaggtgttactccatccaaagttccacattggactgctttcttatcaatgcttattggtctattttacaacaagacttttaggcagaaactagaatacctattggaacaaatctctgaagtatggttgttgcctcactgggttgacttggctaatgttgaagtcttggccgccgataacacccgtgttcctttgtacatgttgatggttgccgttcacaaggaattggactctgacgatgtcccagatggtagattcgacatcatcttgttgtgtagagactcctctagagaagttggtgaataa

SEQ ID NO: 5019 - DNA, 252 bp, Artificial Sequence
  Optimized genes for Saccharomyces cerevisiae
atggctgatcaagaaaactctccattgcacactgttggtttcgatgccagattcccacaacaaaaccaaaccaagcattgttggcaatcttatgtcgactaccacaagtgtgtcaacatgaaaggtgaagattttgctccatgtaaggttttctggaagacttacaatgctttgtgccctttagactggattgaaaaatgggatgaccaaagagaaaagggtatttttgccggtgacatcaactccgattaa

SEQ ID NO: 5020 - DNA, 312 bp, Artificial Sequence
  Optimized genes for Saccharomyces cerevisiae
atggttactcaattcaagaccgcatcagagtttgactctgctattgcccaggacaaattggtcgtggtagatttttacgctacctggtgtggtccatgtaagatgatcgctccaatgattgaaaaattctctgaacaatatcctcaagctgatttctacaagttggatgtcgacgaattgggtgatgttgctcaaaagaacgaagtttccgctatgccaactttgttactattcaaaaacggtaaggaagtcgccaaggttgttggtgctaacccagctgccatcaagcaagccattgctgctaatgcttaa

SEQ ID NO: 5021 - DNA, 1692 bp, Artificial Sequence
  Optimized genes for Saccharomyces cerevisiae
atgtctgaaattactttgggtaagtacttgtttgaaagattgaagcaagttaacgttaatactgtctttggtttaccaggtgattttaaccttagtcttttggacaagatctatgaagtcgaaggtatgagatgggctggtaacgctaacgaattgaacgccgcttacgccgcagatggttacgctagaatcaagggtatgtcctgtatcatcaccacatttggcgtaggtgaattaagcgccttgaacggtattgccggttcttatgctgaacacgttggagtcttgcatgttgttggtgtcccatctatttcagcacaggcaaagcagctattgttgcaccatacattaggtaatggtgatttcaccgttttccaccgtatgtctgccaacatctccgaaaccactgctatgatcactgacattgctaccgccccagcagagattgataggtgcattagaactacatatgtcacccaaagaccagtctacttaggcctacccgctaatttggttgatttaaatgttccagctaaattactacaaaccccaattgacatgagcttgaagcctaacgacgctgaatccgagaaagaagttattgataccatccttgcattggtcaaggatgccaagaacccagtcattttggctgacgcttgttgttccagacacgatgttaaggctgagaccaagaaattgatagacttgacacaattcccagcatttgttactccaatgggtaaaggttctatcgatgaacaacatccaagatacggtggtgtttacgtcggtactttgtccaagccagaagtaaaggaagctgtggaatctgctgatttgatcttgagtgtgggtgctttgttatcagacttcaacaccgggtccttctcttactcctacaagaccaaaaacattgttgaattccattctgaccacatgaaaatcagaaacgctacttttcctggtgttcaaatgaagttcgtcttacaaaagctgttgactaccattgctgatgctgctaagggatataagccagttgctgttcctgctcgtactccagccaatgctgctgtcccggcttctactcctctgaagcaagaatggatgtggaaccaattgggtaacttcttgcaagaaggtgacgttgtcatcgccgaaacgggcacttccgctttcggtatcaaccaaactacattcccaaacaacacttatggtatttctcaagtcttatggggttccatcggtttcactactggtgctacgctaggcgccgcctttgctgctgaagaaattgacccaaagaagagagttatcttattcattggtgacggttcactccagttaaccgtccaagagatatcgaccatgattcgttggggtttgaaaccatacctgttcgttttgaataacgatggttacactatcgaaaagttgattcacggtccaaaagctcaatacaatgaaattcaaggttgggaccatttgtctttgttgccaactttcggtgccaaggactacgaaactcacagagttgccaccaccggtgaatgggataagctaactcaagataaatctttcaatgacaactctaagattagaatgattgaaatcatgttgcctgtatttgatgctccacaaaacttggtggagcaagctaagttgaccgctgccactaatgccaaacaataa

SEQ ID NO: 5022 - DNA, 1098 bp, Artificial Sequence
  Optimized genes for Saccharomyces cerevisiae
atggacttggtcttggaagtcgctgatcattacgttttggacgatctatatgccaaggtcttacctgcctcgttggctgctaacatcccagtcaaatggcaaaagctactcgggttaaatagcggattttctaactctaccattttgcaggaaaccttgaactccaaaaatgccgttaaagaatgtagaagattctacggtcaagttcctttcctatttgatatgtccacgacatcatttgcatccttgttgccaagaagtagcatattacgtgaatttttgtctctatgggttattgtcaccatcttcggtttgttactttacttgtttactgcttccctgagttacgttttcgtgtttgacaagtctatctttaatcatcctcgttatttgaagaaccaaatggctatggaaattaaattggccgtctctgctattccatggatgtctatgttgactgttccatggttcgttatggaattgaatggtcactcaaaattatacatgaagattgactacgaaaaccacggtgtcagaaagttgatcattgaatactttactttcattttcttcactgactgtggtgtttatttagctcacagatggttgcactggccaagagtttacagagctttgcacaagcctcatcacaagtggttagtttgtaccccattcgcttctcactctttccatccagttgatggtttcttgcaatctatttcctaccatatctacccattgattcttccccttcataaggtttcttatctgatcttgttcaccttcgtcaacttctggactgtcatgattcacgacggtcaatacttgtccaacaacccagctgttaacggtactgcatgccacaccgttcatcatttgtacttcaactacaactatggccaatttaccactttatgggacaggttgggtggttcttaccgtagaccagatgattccttattcgatccaaagttgagagatgccaaagagacatgggatgctcaagtcaaggaggtggaacacttcatcaaggaagttgaaggtgatgacaacgacagaatctatgaaaatgacccaaacactaagaagaataactaa

SEQ ID NO: 5023 - DNA, 1788 bp, Artificial Sequence
  Optimized genes for Saccharomyces cerevisiae
atgccaactgtttccgttaacaaacaacaattgtttgatttgctcggcaagaactacacttcccaggaatttgacgagttgtgctttgaattcggtatggaaatggacgaagatacaaccgaagaagctctaaagaccggtgaagaaccagaattgaaattggatatctcagctaacagatacgatctgctatgtattgaaggtatttcccagagcttaaacgaatatttggaaaggaaggaacgtccagactacaagctgtcgaagccaaccaccaagttgatcattgacaaaagcacagaacaaatcagaccattcgctactgctgcagtattaagaaacatcaagttaaatgaaaaatcttacgcctctttcatcgccttgcaagacaagctacacgccaacttgtgtcgtaaccgtagtttggttgctatgggtactcatgacttggactccatcgaaggtccattccactacagagctttgcctccaaaggacatcaaattcgtcccattgaaccaaactcaagaattcacaggtgataagttgatagagttttataagtctccagagcaaaagaacaatatcggtagatatgtccacattattgaagactctcccgtgttcccagtcatcatggactcaaaagacagagtttgttctttgccaccattaattaactctgaacattctaagatctccgtcaacaccagaaatatcttgattgatatcactgccactgataaaactaaggccgaaattgtcttgaacattttgactaccatgttctccaggtactgtgatgaacctttcactgtcgagcctgttgaaattgtttcagaacacaacggtcaatctagattggctccaaacttcaacgatagaatcatggatgtctccattaaatatatcaattcttgtttaggtttagaccaatctgctgatgagatagctcattgtttgaagaagatgtctttgcacgctgttcaaagtaaagaagacaaggacattcttcatgttgatattccagttactagaccagatattttacatgcttgtgacatcatggaagatgctgcagtcggttatggttttaacaaccttcctaagggtgaaaagttgtctaacgctaattttattgctaagcctttgccaatcaacaaggtttctgacattttccgtgttgcctcctctcaagctacctgggttgaagtgttacctctaacgctgtgctcccacgatgaaaatttcaagttcttgagacaatccgacaatggtgacttagctgtcaaacttgcaaacccaaagacattagaataccaagttgttagaaccactttgctacccgggattttgaagaccgttaaggaaaacagaaagcattccttgccaattaaggttttcgaaaccggcgacgtagtgtttaaagatgacaaattggaaagaaaggcttacaacgaaagacactgggctgctatttacgttggtaagaattctggtttcgaaatcatccaaggtttgttgggtaagattatgcaaaccttcagaactgaatggattgccgattacggtgcagccgcgagtggaagaggttactggatcgaggaggatgattcagtcaagacttacttcccgggccgtggtgccaaggtcatgtttagatctaaagagggtgctgaaccaaagcaaattggtcacttgggtgttttgcatccagaagttatgatgaacttcgatgttccatttgccgcttcttttgtcgaagttaatgctgaagtcttcttataa

SEQ ID NO: 5024 - DNA, 366 bp, Artificial Sequence
  Optimized genes for Saccharomyces cerevisiae
atggctccaaacacttccagaaagcaaaagattgctaagaccttcactgttgatgtctcctctccaactgaaaacggtgttttcgatcctgcatcttacgccaagtacttaatcgaccacatcaaggttgaaggtgctgtcggtaacttgggcaatgctgttactgtcaccgaggatggtaccgttgtcacagtagtgtcaacagccaaattttctggtaagtatctaaaatacttgactaagaaatatttgaagaagaaccaattgagagactggattcgttttgttagtaccaagactaatgaatacagattggctttctaccaagttaccccagaagaagatgaagaggaagacgaagaataa

SEQ ID NO: 5025 - DNA, 666 bp, Artificial Sequence
  Optimized genes for Saccharomyces cerevisiae
atggctcgtcgtccagctagatgctacagatatcaaaagaacaagccatacccaaagtcccgttacaacagagctgttccagactctaagattagaatttatgatttgggtaagaagaaggctaccgttgacgaattccctttatgtgttcacttggtttctaacgaattggaacaattgtcctctgaagcactagaagccgccagaatctgtgccaataagtacatgactaccgtgtctggtagagatgctttccatttgagagtcagggtccacccattccacgtcctgcgtattaataagatgttgtcatgtgctggagctgatagattgcaacaaggtatgagaggtgcttggggtaaacctcatggtttggctgcacgcgtagatattggtcaaatcattttctctgttagaacaaaggactccaacaaagatgtcgttgttgaaggtttaagaagagccagatacaagttcccaggtcaacagaagatcatcttatccaagaaatggggtttcactaatttggacagaccagaatacttgaagaagagagaagctggtgaagttaaggatgacggtgcctttgtcaaattcctaagtaaaaaaggcagccttgaaaacaacatcagagagtttcccgagtattttgctgctcaagcttaa

SEQ ID NO: 5026 - DNA, 531 bp, Artificial Sequence
  Optimized genes for Saccharomyces cerevisiae
atgtctgacttggtcaataaaaaattcccagctggtgattacaagttccaatatattgccatttctcaatctgatgctgattccgaatcttgtaagatgccacaaactgttgaatggtccaaattgatctctgaaaataagaaggttatcattactggtgctccagccgccttctctccaacttgcacagtatcccatattcctggttacatcaactacttggatgaattggttaaggaaaaggaagttgaccaagttattgttgttacggtggacaacccattcgccaaccaagcttgggctaagagcttaggagtcaaggacaccactcacatcaagtttgcatcagacccaggttgtgctttcaccaagagtattggctttgaactagcagttggtgacggtgtctactggtctggtagatgggctatggttgtcgaaaacggtatcgttacttatgctgctaaagaaaccaaccctggtactgatgtcaccgtctcctcggtggagtccgtcttggctcacttataa

SEQ ID NO: 5027 - DNA, 402 bp, Artificial Sequence
  Optimized genes for Saccharomyces cerevisiae
atgcaattctccacagttgcttccattgctgctgttgccgctgtcgcttctgctgctgccaacgttacaaccgctaccgtttctcaagaatctaccactttggttaccattacctcttgtgaagaccatgtttgctctgaaactgtctctccagccttagtctccactgctactgtaacggtggatgatgttatcactcaatacactacctggtgtccattgaccacagaggctccaaagaacggtacttctactgccgcacctgtcactagtactgaagctcctaaaaataccacctcagcggccccaactcactccgtcaccagctatactggtgctgccgccaaggctttgccagctgctggtgccttgttggctggcgctgcagcacttctattataa

SEQ ID NO: 5028 - DNA, 822 bp, Artificial Sequence
  Optimized genes for Saccharomyces cerevisiae
atgtctaacccatttgatttgttgggtaacgatgtcgaagatgccgacgtcgttgttctacctccaaaggaaattgtcaaaagtaacacttcttctaagaaggctgatgtacccccaccatccgctgacccttccaaagctagaaagaatagaccaagaccttctggtaacgaaggtgctattagagacaagacagcgggccgtcgtaacaataggagcaaggacgtgactgactctgctactaccaagaaatcaaacactagaagagccaccgatagacactctagaactggtaaaacggacactaagaagaaggttaaccaaggttggggtgatgacaaaaaggaactgtcggctgaaaaagaagctcaagccgatgcagctgctgaaatcgctgaggatgctgcagaggcagaagacgctggtaagccaaagactgcccaattatccttgcaagactacttgaaccaacaagctaacaatcagttcaacaaggttccagaagccaagaaagttgaattagatgctgaaagaattgaaaccgctgaaaaggaagcttacgtcccagctaccaaggtcaagaacgttaagtccaagcaattgaagaccaaagaatatttggaattcgatgccactttcgtcgagtcaaataccagaaaaaactttggtgacagaaataacaactccagaaacaacttcaataacagacgtggtggtagaggtgccagaaagggaaataatacagccaacgctaccaactctgccaatactgttcaaaagaaccgtaacatcgatgtttccaacttgccatctttggcttaa

SEQ ID NO: 5029 - DNA, 1089 bp, Artificial Sequence
  Optimized genes for Saccharomyces cerevisiae
atgaggtcgctgaacactttgttactttcactatttgttgccatgtcttctggtgctccattgttgaagatcagagaagaaaagaacagttcattgccatctatcaagattttcggtaccggtggtaccattgcctccaagggttccacttctgctacgacagccggttattccgttggtttgaccgtgaatgacttgatcgaggctgtcccctccttagctgaaaaggctaatttggactatttgcaagtttccaatgtcggttctaactccttgaactacactcatttgattcctttgtaccatggtatctctgaagctttggcttctgatgattatgctggtgccgtcgtcactcacggtacagataccatggaagaaactgctttcttcttggatttaaccatcaactctgaaaaaccagtttgtatcgcaggtgctatgagaccagctaccgcaacatctgccgacggtccaatgaacctttaccaagctgtttctattgctgctagcgagaaatctttaggtagaggtactatgattaccttgaacgatcgtattgcttccggtttctggactaccaagatgaatgctaactcgctagacactttcagagctgacgaacaaggttacttgggttacttttccaacgacgatgttgaattctactacccacctgtaaagccaaacggttggcaattttttgatatcagcaacttgactgacccaagtgaaatcccagaagttatcattttatactcttatcagggattaaacccagaattgatagtcaaggccgtgaaagatttgggcgccaaaggtattgttttggccggctcaggtgcgggttcttggaccgccactggttccatcgttaacgaacaactgtacgaagaatacgggattccaattgtccactctagaagaactgctgatggtactgttccaccagatgacgctcctgagtacgctattggtagtggttacttaaatcctcaaaagtccagaattttgctacaattgtgtttgtattcaggctatggtatggaccaaatccgttctgttttctctggtgtctacggtggataa

SEQ ID NO: 5030 - DNA, 459 bp, Artificial Sequence
  Optimized genes for Saccharomyces cerevisiae
atgcaaatcttcgttaagaccctgactggtaagactatcactttagaagttgaatcctcagataccattgacaacgtcaaatccaagattcaagacaaagagggtattccacctgaccaacaaagattgatttttgccggcaagcagttggaagatggtagaactttgagtgattacaacatccaaaaggaatctacactacatttggttttgagattaagaggtggtggtaagaagagaaagaaaaaagtctataccactccaaagaagatcaagcacaagcataagaaggtcaagttggccgtcttatcttactataaagttgatgctgaaggtaaagtaaccaagcttcgtagagaatgttctaacccaacttgcggtgctggtgttttcttggctaaccacaaggaccgtttgtactgtggtaagtgtcactctgtttacaaggtgaatgcttaa

SEQ ID NO: 5031 - DNA, 267 bp, Artificial Sequence
  Optimized genes for Saccharomyces cerevisiae
atgggtaagggtactccatctttcggtaaacgtcacaacaagtctcatactttatgtaacagatgcggtagaagatcctttcacgttcaaaagaagacttgttcaagttgtggttacccagctgccaagaccagatcttacaactggggtgctaaagcaaaaaggagacacaccactggtacaggcagaatgagatatttgaagcatgtctcccgtagattcaagaatggtttccaaaccggttctgcctccaaggcttctgcttaa

SEQ ID NO: 5032 - DNA, 3135 bp, Artificial Sequence
  Optimized genes for Saccharomyces cerevisiae
atgtccgactctcaacaatctatcaaggttttggaagaattgttccaaaagttgagcgtcgcaaccgctgataatagacacgaaattgcttccgaagtggcctcttttcttaatggtaatatcatcgagcacgatgttcccgaacatttctttggcgaattagcaaaaggtattaaagataaaaaaactgccgccaacgctatgcaagctgttgctcacatcgctaaccaatccaacttgtctccatccgttgagccatatattgttcaattggtcccagccatctgtaccaatgctggtaacaaggataaggaaatccaaagtgtggcatctgaaactttgatctctattgttaatgccgtcaacccagtcgctattaaggcgctgctgcctcacttgacaaatgctatcgtggaaaccaacaaatggcaagaaaagattgccatactggctgctatctccgcaatggttgatgctgctaaagaccaagttgcattgagaatgccagagctaatacctgtacttagcgaaaccatgtgggataccaagaaggaagtaaaggctgctgccactgctgccatgactaaggccaccgaaactgttgacaacaaggatatcgaacgtttcatcccatctttgattcaatgtatcgctgatcccactgaagttccagaaaccgttcatttattgggtgctactactttcgtcgccgaagtcactccagctacattatccatcatggtccctttgttgtctagaggtttgaacgaaagagaaacgggcatcaagagaaaaagcgctgtcattatcgataacatgtgtaagctagtagaagatccacaagttattgctccattcttgggaaaattgttgccaggtttgaagtctaacttcgctaccattgctgaccctgaagctagagaagttactttgcgtgcgctcaagactttgagaagagttggaaacgtcggtgaggatgacgcaattcctgaagtctcccatgctggtgacgtgtctaccactttacaggttgtcaacgaattgttgaaggacgaaactgttgccccaagattcaagatcgttgttgaatatatcgccgccattggtgctgacttgattgacgaaagaattattgaccagcaggcttggttcacccatatcaccccatacatgaccatctttttgcacgaaaaaaaggctaaggatattttggacgagttccgtaagagagctgtggacaacattccagttgggccaaattttgatgatgaagaagacgaaggtgaagatttgtgtaactgtgaattctccctagcttacggtgccaagattctattaaacaagacccaattaagattgaagcgtgccagaagatatggtatttgcggtcctaatggttgtggtaagagtaccttgatgagagccattgcaaacggtcaagtcgatggttttccaactcaagaggaatgtagaaccgtctacgtcgaacacgacattgatggcactcacagtgatacttccgtcttggattttgttttcgaatcaggtgttggtactaaagaagccatcaaggacaagttgatcgaatttggtttcactgatgaaatgattgctatgccaatttccgctttgtccggtggttggaagatgaagttggctttggctcgtgctgttctaagaaacgccgacatcttgcttttagacgaacctaccaaccatttggacactgtcaacgttgcttggttagttaactatttgaatacttgtggtatcactagtattactatctcacatgactctgtttttctggacaatgtttgtgagtacatcatcaactatgaaggtttaaaattgaggaagtacaagggtaacttcactgaattcgttaagaagtgtccagctgctaaggcctacgaagaactaagtaacaccgatttagagtttaagttcccagaaccaggttacttagaaggagtgaagaccaagcaaaaggctattgtaaaggtcaccaatatggaattccaatacccaggtacttctaagcctcaaattacagacattaactttcagtgctcgctgtcgagcagaattgccgttatcggtccaaacggtgcaggtaagtccacgttgattaatgtcttgaccggtgagttgttaccaacctcaggtgaagtttacactcatgaaaactgtcgtattgcttatatcaaacaacacgctttcgcccacattgaatctcacttggacaagactccatcagaatacattcaatggagatttcaaactggtgaagacagagagacaatggatagagctaacagacaaatcaatgaaaacgacgctgaagctatgaacaagatcttcaagatagaaggtacaccaagaagaatagctggtatccattctcgtaggaaatttaagaacacttacgaatacgagtgttctttcttacttggtgaaaatattggtatgaaatctgaaagatgggttccaatgatgtctgtcgacaacgcatggattccaagaggtgaattggttgaatcccactccaagatggttgctgaagttgacatgaaagaagcgttagcttctggtcaattcagaccattgactagaaaggaaattgaagaacactgctctatgttgggtctagacccagaaatcgtctctcattccagaatcagagggttatcaggcggacaaaaagtcaagttagtactagcagccggtacctggcaaagacctcatctaattgtcttagatgaaccaactaactacttggatcgtgattctttgggcgccttgtcaaaagctttgaaagaatttgaaggtggtgtcatcattattacccactctgctgagttcacaaagaatctcacagaagaagtctgggctgtcaaggacggtagaatgacaccgtctggtcacaactgggtttccggccaaggtgctggtccaaggattgaaaagaaggaagatgaggaagacaaattcgatgccatgggtaacaaaattgccggtggtaaaaagaagaagaaactttcctctgctgaattgcgcaagaagaagaaggagcgtatgaagaaaaagaaagagttaggtgatgcttacgtttcttctgatgaagaattctaa

SEQ ID NO: 5033 - DNA, 1719 bp, Artificial Sequence
  Optimized genes for Saccharomyces cerevisiae
atgttacgttcctctgttgttagatcgagggcaacgttgcgtccattgcttcgtagagcctattcttctcataaagagctaaagtttggtgttgaaggtcgtgcctctttgttgaagggagttgaaactttagctgaagctgttgccgctactttgggtcctaagggtagaaacgtcctaattgaacaaccatttggtccaccaaagattactaaggatggtgtcactgttgctaagtccattgttttgaaggacaagttcgaaaatatgggtgccaagctcctgcaggaggtggcctccaagaccaacgaagctgctggtgatggtaccaccagtgctactgttttgggtagagctattttcactgaatctgtcaagaacgttgctgctggttgtaacccaatggacttaagaagaggttctcaagttgctgtcgaaaaagttatcgagtttttatctgccaacaagaaagaaatcactacttctgaagaaattgctcaagtcgccactatctccgctaatggtgactctcacgtcggtaagttattggcatctgctatggaaaaggttggtaaggagggtgtcatcaccattagagaaggcagaaccttggaagatgaattggaagttactgaaggtatgagattcgatagaggtttcatctctccatacttcattaccgatccaaagtcttcaaaagtcgaatttgaaaagccactacttttgttgtccgaaaagaagatcagctccatccaagacatcttgccagctttagaaatttccaaccaatccagaagaccattgttgatcatcgctgaagatgttgacggtgaagcattggctgcttgcattctaaataaactgcgtggtcaagttaaggtttgtgctgtaaaagctccaggtttcggtgacaacagaaaaaatacaattggtgacattgccgtcttaaccggtggtactgtgtttactgaagaattggacttgaaaccagaacaatgtaccatcgaaaacttgggctcatgtgattcaataaccgtcaccaaggaagacactgtcattttgaacggtagcgggcccaaggaagccattcaagaaagaattgagcagatcaagggttctattgatatcacaaccactaactcttacgaaaaggaaaaattgcaagaaagattggccaagttgtctggaggcgtcgctgtgatcagagttggtggtgctagtgaagttgaagtaggcgagaagaaggacagatacgatgatgctttgaatgctaccagagctgccgttgaggaaggtatcttaccaggtgggggtacagcgctggttaaagcgagtagggtcttggatgaagttgtcgtggataacttcgaccaaaagcttggagtagatattataagaaaggctatcacaagacctgctaagcaaatcattgaaaacgccggtgaagaaggttccgttattatcggtaaattgattgacgaatacggtgatgacttcgctaaaggttacgacgcttccaaatctgagtatactgacatgttggctactggtattattgacccattcaaggtcgttcgttccggtttggttgatgcttctggtgttgcctcattactagccactaccgaagtcgcaattgtcgatgcccctgaacctccagctgcagcaggtgctggtggtatgccaggtggtatgcctggtatgccaggcatgatgtaa

SEQ ID NO: 5034 - DNA, 204 bp, Artificial Sequence
  Optimized genes for Saccharomyces cerevisiae
atggactccaagactccagttaccctagccaaagtgatcaaggttttgggtagaactggttctagaggtggtgttactcaagttagagttgaattcttggaagatacatcaaggaccattgtcagaaacgtcaagggtccagtccgtgagaatgatattttggtcttgatggaatctgaaagagaagctagaagattacgttaa

SEQ ID NO: 5035 - DNA, 1689 bp, Artificial Sequence
  Optimized genes for Saccharomyces cerevisiae
atgtctttgttgtacattattcttttattcactcaatttttgttattgccaactgatgcttttgacagatctgccaacactaatatagctgtgtactggggtcaaaactctgccggtacccaagaatctttggccacttactgtgaaagttccgacgctgatatcttcttgttgtcatttctaaaccaattcccaaccttgggtttgaactttgctaacgcttgttctgatactttctccgatgggttattgcactgtacccagatcgccgaagatattgaaacttgtcaaagtctaggtaagaaagttttgctatctttgggtggtgcttccggttcttatttgttcagtgatgactctcaagctgaaacctttgcccaaactctatgggacacttttggtgagggtactggtgcctctgaaagaccattcgactctgcagttgtcgatggtttcgatttcgacatcgaaaacaataacgaagtcggttattctgctttggctactaaattgagaaccctctttgctgaaggtaccaagcaatactacctgtctgctgctccacaatgtccatacccagatgcctctgttggtgacttgttggaaaatgctgacattgactttgcattcatccaattctacaacaactactgttccgtttccggccaattcaactgggatacctggttgacttatgctcaaaccgtctctccaaacaagaatattaaactgttcttaggcttaccaggttccgcatccgccgctggctctggttacatctctgacacctctctgttggagagcaccattgccgacattgctagttcgtcctctttcggtggtattgctttatgggatgcttcccaagccttttccaatgaattaaacggtgaaccatatgttgaaattttgaagaacttgcttacatctgcttcacagactgctaccactactgtggcaacgtccaagacctcagctgcctccacttcttctgcgtcaaccagcagcgcttctacctctcaaaagaagactacccaatccaccacatctactcaatctaaatctaaggttactttgtccccaactgcttcttccgctatcaagacatccattactcaaaccactaagactcttacatcctctacaaagaccaaaagctctttaggtactacaacaaccgagtctactttgaactccgttgctattacctccatgaagaccactctatcgtcacaaatcactagtgcggcattggtcactcctcaaactacaactacttccatcgtttcttccgctcctattcaaaccgccatcaccagtaccttatctcctgccaccaagtcttcttcagtagtctccttgcaaactgccacgacatcgactttgtctcccaccactacctccacttccagtggatcgacttccagcggaagcacttcatctgactccaccgctcgtactttagccaaggaattgaatgcccagtatgctgctggtaagttgaatggtaaatccacctgtactgaaggtgaaatcgcttgctctgcagacggtaagttcgctgtttgtgatcattctgcttgggtttacatggaatgtgcttctggtacaacgtgctacgcttacgattcaggtgattctgtctacactcaatgtaacttctcttacttggaatccaactatttctaa

SEQ ID NO: 5036 - DNA, 192 bp, Artificial Sequence
  Optimized genes for Saccharomyces cerevisiae
atggctaaggttcacggttctttggctagagccggcaaagtcaagtcccaaactccaaaagttgaaaagactgaaaaacctaagaagccaaagggtagagcttacaagagattgttatataccagaagattcgttaatgtgacactagtcaacggtaagcgtagaatgaacccaggtccatctgttcaataa

SEQ ID NO: 5037 - DNA, 1335 bp, Artificial Sequence
  Optimized genes for Saccharomyces cerevisiae
atgccatctcatttcgacactgttcaattacatgccggccaagaaaacccaggtgataacgcccacagatcacgtgctgttccaatttacgctactacctcctatgtcttcgagaattccaagcacggttctcagctgtttggtttagaagttcctggttacgtttactctagattccaaaacccaacttctaacgttttggaagaaagaattgccgctcttgaaggtggtgctgccgccttagcagtaagctctggtcaagctgctcaaactttggccatccaaggtctagctcacactggtgacaacatcgtatctacaagctatttgtacggtggtacttacaaccaatttaaaatttcattcaagagattcggtattgaagccagatttgtcgaaggtgacaatcctgaagaattcgaaaaggtttttgatgaaagaaccaaggctgtctacctagaaaccatcggtaatccaaagtacaatgtgccagattttgaaaagattgttgctattgctcataaacatggaattccagtcgttgtcgacaacactttcggtgccggtggttacttctgtcagccaatcaagtatggcgcagacattgtgacccattctgctaccaaatggattggtggtcacgggacaacgatagggggtatcatcgttgactccggtaagttcccatggaaggactacccagaaaaattccctcaattctctcaaccagctgaaggttatcatggtaccatttataacgaagcttatggtaacttggcttacattgtccacgttagaactgaattgttgagggacttgggtccattgatgaaccctttcgcctccttcttgctattgcaaggtgttgaaactttatctttgagagctgagagacacggtgaaaatgctttgaaattggctaagtggttggaacaatccccttacgtctcttgggtttcttaccccggtttggcttcccattcgcaccacgaaaacgcgaagaagtacttgtccaacggtttcggaggtgtcttgtctttcggtgttaaagatttgccaaacgctgacaaggaaactgacccattcaagttaagtggcgcccaagttgttgataatttgaagcttgcaagtaacttagctaacgtcggtgatgccaagaccttggttatcgctccatactttaccactcacaagcaattgaacgataaagagaaattagcatcaggcgtcactaaggatctgatccgtgtctccgttggtatcgaatttattgatgatatcattgctgatttccaacaatcttttgagacagtgtttgctggtcaaaagccataa

SEQ ID NO: 5038 - DNA, 2337 bp, Artificial Sequence
  Optimized genes for Saccharomyces cerevisiae
atgttgtctgcccgttccgccatcaagagaccaattgttagaggcttggctacggtgtcaaacttgactcgtgattccaaggtcaaccaaaatctattagaagatcactctttcatcaactataagcaaaacgttgaaaccttggacattgtgagaaagagattaaacagaccattcacctacgccgaaaaaattttgtatggtcacttggatgacccacatggtcaagatatccaaagaggtgtatcgtacttgaagttacgccccgatcgtgttgcatgccaagacgctacagctcaaatggctatcctacaattcatgtcagcaggtttgccacaagttgctaagcccgtcaccgtccattgtgatcatttgattcaagcccaagtcggtggtgaaaaggacctgaaaagagccattgaccttaataaggaagtatatgatttcctggcttctgcaacagcgaagtataacatgggtttctggaagccaggttctggtattattcatcaaattgtcttggaaaattacgctttcccaggagccttgatcattggtactgactctcacaccccaaacgctggcgggttgggtcagcttgcaattggcgttggtggtgccgatgctgtcgatgttatggctggtagaccatgggaacttaaagccccaaagatccttggtgtcaagttgacaggcaaaatgaacggttggacttcacctaaggatattatcttgaaattggctggtatcactactgtcaaaggtggtacaggtaagattgttgaatactttggtgacggtgttgacaccttcagtgctaccggtatgggtaccatctgtaatatgggtgctgaaattggtgctaccacttctgttttcccattcaacaaatctatgattgaatatttggaagctactggtcgtggtaaaatcgctgacttcgccaagttgtaccacaaggatttattgtccgctgataaagatgccgagtatgacgaagttgtggaaatcgacttgaacaccctagagccatacatcaatggcccatttactcctgatttggccactccagtcagcaagatgaaggaagtcgccgttgccaacaactggccattagatgtcagagtcgggctcattggatcttgtaccaactcttcttacgaagacatgtctagatctgcttccattgtaaaagacgctgctgctcacggtttaaagtctaagaccattttcactgttacccctggttctgaacaaatcagagctactattgaaagagatggtcaattagagactttcaaagaattcggtggtattgttttggctaatgcttgtggtccatgtatcggtcaatgggatagaagagacatcaagaagggtgacaaaaacactatcgtttcctcctacaaccgtaactttacctccagaaacgatggtaaccctcaaactcacgcttttgtcgcatccccagaattggttactgcctttgctattgctggtgatttgagatttaatcctttgaccgacaagctaaaggacaaggatggtaacgaatttatgctgaagccaccacacggtgatggcttacctcagagaggttacgatgcgggtgagaatacttaccaagctccacctgctgataggtcaacggtcgaagttaaggtttctccaacttccgacagattgcaattgttgaaacctttcaagccatgggacggtaaggacgcaaaagatatgccaatcttaataaaggctgttggtaagactaccacagaccacatttccatggccggtccatggttgaagtacagaggtcatttagagaacatttctaacaactacatgatcggagccattaatgctgaaaacaagaaggctaactgtgtcaagaatgtctacactggtgaatacaagggtgttccagacactgctcgtgattatagggaccaaggtatcaaatgggttgttatcggtgacgaaaacttcggtgaaggttccagcagagaacacgccgctttggaaccaagattcttgggcggatttgctattattaccaagagttttgccagaattcacgaaactaatttgaagaaacaaggtttgttaccattgaatttcaagaacccagctgactacgataagatcaacccggacgacagaatcgatatactaggtctagctgaattagctccaggtaaaccagttaccatgagagttcatccaaagaacggtaagccttgggatgctgtgttaactcatacatttaacgacgagcagatcgaatggttcaagtacggtagtgcattgaacaagattaaggccgatgaaaagaaataa

SEQ ID NO: 5039 - DNA, 237 bp, Artificial Sequence
  Optimized genes for Saccharomyces cerevisiae
atggctagagaaattaccgatatcaagcaatttttggaattgaccagaagagctgacgtcaagactgctactgttaagattaataaaaaattgaacaaggctggtaagccattcagacaaaccaagttcaaggttcgtggttcttcatccttgtacacattagttatcaacgatgccggtaaagccaagaagttgattcaatctctacctccaactttgaaggtcaacagattataa

SEQ ID NO: 5040 - DNA, 939 bp, Artificial Sequence
  Optimized genes for Saccharomyces cerevisiae
atgggtggtatcagagaaaagaaggctgaatactttgctaagttacgtgagtatttggaagaatataaatccctattcgtcgtcggggtggacaacgtctcatctcaacaaatgcacgaagtcagaaaggaattgagaggtagagctgtcgttttgatgggtaagaacaccatggttagaagagccattcgtggtttcttgtctgacttgccagattttgaaaaactattaccatttgtcaagggtaatgttggatttgtttttaccaacgaaccattgactgaaatcaagaatgtcatcgtgagcaacagagttgctgctccagctagggccggtgctgttgcccctgaagacatctgggttcgtgctgttaacactggtatggaaccaggtaaaacatctttcttccaagctttgggtgttccaaccaagattgccagaggtactattgaaattgtttctgatgttaaggttgttgacgctggtaacaaagtgggccagtctgaagcttctttgttaaatttgttgaacatttctccattcactttcggtttgaccgttgtccaagtctacgataatggtcaagttttcccatcttccatcttggacattactgatgaagagttggtttcacatttcgtttctgctgtctccaccatcgcctccatatccttagctattggttaccctacacttcccagtgtaggtcacactttgatcaacaactacaaggacctgttggctgtagcaattgctgcttcgtatcattacccagaaattgaagatttggtcgacagaatcgaaaacccagaaaagtacgctgccgctgcacctgccgccactagtgccgcatctggtgatgctgctccagctgaagaagccgcagcggaggaggaagaagaatccgatgatgacatgggtttcggcttattcgattaa

SEQ ID NO: 5041 - DNA, 5631 bp, Artificial Sequence
  Optimized genes for Saccharomyces cerevisiae
atgaacactgaccaacaaccataccaaggtcaaaccgactacactcaaggtcctggtaacggtcaatcacaagaacaagattacgaccaatacggccagccactatacccttctcaagctgatggttattatgatccaaatgtcgctgctggtactgaagcagacatgtatggtcaacaacctccaaacgaatcttacgaccaggattatacaaacggtgaatattacggacagcctcctaacatggccgcacaagacggtgaaaacttctctgatttctccagttacggtccaccaggtactccaggttacgattcatacggtggtcagtacaccgccagccaaatgtcttatggcgaaccaaactcctctggtacttctacaccgatttacggtaactacgacccaaacgccattgccatggctttgcctaatgagccatatccagcttggactgctgactcccagtctccagtctccattgaacaaattgaagatatctttatcgatttgaccaacagactaggtttccaaagagattccatgagaaatatgtttgaccacttcatggtcttgttggatagtagatcatcaagaatgtctccagaccaagccctattaagtttgcacgctgattatattggtggtgatactgccaactataagaaatggtacttcgctgctcaattggacatggacgatgagattggtttcagaaacatgtcattgggtaaattgtcccgtaaggctagaaaagctaagaagaagaacaaaaaagctatggaagaagctaaccccgaagacactgaggaaacccttaataagatagaaggtgacaatagcctagaagctgcagatttccgttggaaggctaagatgaaccaattgtccccattggaaagagttagacacatcgcgttatatttgctatgttggggtgaagccaatcaagtacgtttcaccgctgaatgtttgtgtttcatctacaagtgtgctctagattacctggactctccactctgtcaacaacgtcaagagccaatgccagaaggcgacttcttgaacagagtcatcactccaatataccatttcattagaaaccaagtttatgaaatcgttgatggtagattcgtcaagcgtgagagagaccataacaagattgtcggttacgatgatctaaaccagttgttttggtacccagaaggtattgctaagatcgtcttagaggatggtactaagttgattgagttgccattggaagagaggtacttgagattgggtgacgttgtctgggatgacgtgttcttcaaaacttacaaggaaacaagaacttggttgcatctggtcactaacttcaatagaatctgggtcatgcacatttccatcttctggatgtactttgcttataactctcccacgttctacacccacaactaccagcaacttgtggacaatcaacccttagccgcctacaaatgggcctcttgtgctttaggtggcactgttgcctccctcattcagattgttgctactctgtgtgaatggtctttcgtgccaagaaagtgggctggagctcaacacttgtcaagaagattttggttcttatgtataatatttgggatcaaccttggtccaatcatttttgtttttgcatatgacaaggacaccgtctactctactgcggcacacgttgttgctgccgtcatgttctttgtcgctgtagccaccattattttcttttccatcatgccgctgggtggtctttttacctcttacatgaagaagtcgaccagaagatacgttgcttctcagacctttactgctgcctttgctccattgcacggtttagatagatggatgtcctacttggtctgggttaccgttttcgctgccaaatacagtgaaagttactattttctagtcttgtctttacgtgatcctatcagaattttatcaaccactgctatgcgttgtactggtgagtactggtggggtgctgtcttgtgtaaggtccaacccaagatcgttttgggtttggttatcgctaccgatttcatccttttctttttggacacatacttatggtacatcatcgtaaataccatcttctcagttggtaagtctttctacctcggtatctctatcttgacaccatggagaaacattttcactcgtctaccaaagagaatatattctaagatcttggccaccaccgatatggaaatcaagtataaaccaaaggttttgatctcccaagtttggaacgctatcatcatttctatgtaccgtgaacacttgttggctattgatcatgttcaaaaattactttaccatcaagtcccatctgaaatcgaaggaaagcggacgttgagagctccaacatttttcgtctctcaagatgataacaactttgaaactgaattcttcccaagggactctgaagctgaaagaagaatctcgttctttgctcaatccttgagcaccccaattcctgagcccctgccagttgacaacatgccaactttcaccgtacttactcctcattacgccgaacgtatattattgtcgttgagagaaattatcagagaagatgatcaattttctagagttacgttgttggaatacttgaaacaattacatcctgttgaatgggagtgcttcgttaaggataccaagattttggctgaagaaactgcggcttacgaaggtaacgaaaacgaggctgaaaaggaagatgctttgaagagtcaaattgacgacttgccattctattgtatcgggttcaagtccgcagcaccagaatataccttgaggacacgtatttgggcttccttgagatcccaaactttgtacagaactattagtggatttatgaattatagcagagccattaaactattgtacagggtcgaaaatcctgaaattgtacaaatgttcggtggtaatgccgaaggtctggaaagagaattggaaaaaatggccagaagaaagttcaagttcttggtgtccatgcaaagattggcaaaattcaagccacatgaattagaaaatgctgaattcttgttgcgagcttacccagatttgcaaattgcctatttggatgaagaaccaccattgaccgaaggtgaagaaccaagaatctactccgctttgatcgacggtcattgtgaaattcttgataatggtcgtcgccgtccaaaattcagagtgcaattgtctggcaatccaatcttgggtgacggtaagtctgacaaccaaaaccatgccttgatcttctacagaggtgaatacattcaattgattgacgctaaccaagacaactacttggaagaatgtttaaaaatccgttctgttttggctgaattcgaagaattaaacgttgaacaagttaacccatacgctccaggtttgcgttacgaagaacaaacaactaatcatccagtggctattgtcggtgccagagaatacattttctccgaaaactccggtgtattaggagatgttgccgctggtaaggagcaaactttcggtaccttatttgctcgtacactttctcaaatcggtggtaagctacactatggtcaccctgactttattaatgctaccttcatgactaccagaggtggtgtttccaaggcccaaaagggtttgcatttgaatgaagacatttatgccggtatgaacgcaatgttgagagggggcagaattaagcactgcgaatactaccaatgtggtaagggtagagatctgggttttggtaccattttgaacttcactacaaagattggtgccggtatgggtgaacagatgctatcgagagagtattactacttagggacgcagttgccagtcgacagatttttgactttttactacgctcacccaggcttccatttgaacaatttattcatccaattgtccctacaaatgttcatgcttacattagtcaacttatcttctttggctcatgagtccatcatgtgcatttacgatcgtaacaagccaaagactgatgtcttagttccaattggttgttacaactttcaacctgctgttgactgggttcgtcgttatactttaagcatctttattgtcttctggattgctttcgttccaattgtggttcaagaattgatcgaaagaggtctatggaaagccactcaaagattcttctgccatttactatctttgagtcctatgtttgaagttttcgctggtcaaatctactcgtctgctttgttatccgatttagctatcggcggtgctagatacatcagtacaggtagaggtttcgctacttccagaatcccattcagcatcttatactctagattcgcaggatctgccatctatatgggtgctagatctatgttgatgttgttgtttggtacagttgctcactggcaagctcctcttttgtggttctgggcttctttgtcttccttaatttttgccccatttgttttcaacccacaccaattcgcatgggaagacttcttcctagactacagagactatatcagatggctatcaaggggtaacaaccaatatcatagaaactcttggatcggttacgtcagaatgtcacgcgcaagaattactggattcaagagaaagttggttggtgacgaatctgaaaaggctgctggtgatgcctccagagctcacagaaccaacttgattatggcagaaattattccatgtgccatttatgctgctggctgttttatcgccttcactttcattaacgctcaaactggtgtcaagactactgacgatgacagagtcaattctgtcttaagaattatcatctgtaccttggcccctattgcagttaatttgggtgttctctttttctgtatgggtatgtcctgctgctctggtccattgttcggtatgtgttgtaaaaagaccggttccgttatggctggtattgctcatggtgtggccgttattgtccacattgctttttttattgttatgtgggttttggaatccttcaactttgtcaggatgctgatcggtgttgttacttgtatccaatgtcaaagattaatcttccactgtatgaccgcgttgatgttgactagagaatttaaaaacgaccacgccaacaccgctttctggactggtaagtggtatggtaaaggtatgggctacatggcttggacccaaccatctcgtgaattgactgctaaagttattgaactgagcgagtttgccgctgactttgtgttgggtcacgtcattttgatttgccaattaccattaatcatcattccaaagatcgataagtttcactctattatgttattctggttaaagccttccagacaaattagaccacctatttactctttgaagcaaaccagattgagaaagagaatggttaagaagtactgttctttgtatttcttggtcctagctattttcgccggttgtattattggcccagctgttgcatcagctaaaattcacaagcatattggtgattctttggatggtgtcgttcacaacttgttccaaccaatcaacactaccaataacgataccggttctcaaatgtctacctaccaatctcactactacactcacactccaagcttgaagacctggtccactatcaaataa

SEQ ID NO: 5042 - DNA, 384 bp, Artificial Sequence
  Optimized genes for Saccharomyces cerevisiae
atggctaagcaatctttggacgtctcttctgacagaagaaaggccagaaaagcatatttcactgctccatcctctcagcgtagggtgttattatcagccccattgtccaaagagttgagagctcaatacggtatcaaggctttgccaatcagaagagatgatgaagttttggtcgttagaggttccaagaagggccaagaaggtaagatcagcagtgtatacagattgaagtttgctgttcaagttgacaaggtcaccaaggaaaaggttaacggtgcttccgttccaattaatttgcacccttctaaattagtcattactaagctacatttggataaggaccgtaaagccctgattcaaagaaagggtggtaaattggaataa

SEQ ID NO: 5043 - DNA, 1188 bp, Artificial Sequence
  Optimized genes for Saccharomyces cerevisiae
atgttgagaactcaagctgcacgtcttatctgtaactccagagttattactgctaagagaacctttgcattagctaccagagccgcagcttactctagaccagctgccagattcgtcaagccaatgatcactactagaggattaaagcaaatcaacttcggtggtactgttgagacagtctacgagagagctgattggccaagagaaaagttgttggactatttcaaaaatgacacatttgctttgattggttacggttctcaaggttatggtcaaggcctgaacttgcgtgacaacggtttgaacgtcattattggtgtcagaaaggacggtgcctcctggaaagctgctattgaagatggttgggttccaggtaagaaccttttcactgtcgaagacgctatcaaaagaggctcgtacgttatgaacttattgtccgatgccgctcaatctgaaacttggcctgccatcaagcctctgttgaccaaaggtaaaactttatatttttcccacggtttcagccccgtatttaaggacttgactcatgtggaaccaccaaaggatctagacgtcatcttggttgctccaaagggttctggtaggacagtgaggtctttgtttaaagaaggtagaggtatcaatagttcttacgctgtctggaacgatgttactggtaaggcccatgagaaggctcaagccctagctgttgccatagggtcaggatatgtttaccaaaccacttttgaacgtgaagtcaactctgacctatatggtgaaagaggttgtttgatgggtggtattcacggtatgttcttggcccaatatgatgtcttgagagagaatggtcactctccatccgaagctttcaacgaaactgttgaagaagcgacgcagtcattatacccattgatcggcaagtacggtatggactacatgtacgatgcttgctctaccaccgctagaagaggtgctttagactggtaccctattttcaagaatgctttgaagccagttttccaagatttgtacgaatctactaagaacggtaccgaaaccaagcgtagtttagaattcaattcccaaccagattacagagaaaaattggaaaaggaattggataccattagaaacatggaaatttggaaggttggtaaggaagttagaaaactacgtccagaaaaccaataa

SEQ ID NO: 5044 - DNA, 171 bp, Artificial Sequence
  Optimized genes for Saccharomyces cerevisiae
atggctcacgaaaacgtctggttctcacatccaagaagatatggtaagggttccagacaatgtagagtttgctcttctcacactggtttaatcagaaagtacggtttgaacatttgtcgtcaatgtttcagagaaaaagccaatgatattggtttcaacaagtttcgttaa

SEQ ID NO: 5045 - DNA, 237 bp, Artificial Sequence
  Optimized genes for Saccharomyces cerevisiae
atgttgtgtcaacaaatgatcagaaccactgctaagagatcttccaatatcatgaccagaccaattattatgaaacgttccgtccacttcaaagatggtgtttacgaaaacattccattcaaggtcaagggtagaaagactccttatgccttatcacatttcggtttctttgccatcggctttgctgttccatttgttgcttgttacgttcaattgaagaagtctggtgctttctaa

SEQ ID NO: 5046 - DNA, 342 bp, Artificial Sequence
  Optimized genes for Saccharomyces cerevisiae
atggctggtttgaaggatgtcgtcaccagagaatacaccattaacttgcacaagcgtctacatggtgtttctttcaagaagagggccccaagagctgttaaggaaattaaaaaatttgcaaaacttcacatgggtactgaagacgtcagattggctccagaattgaaccaagctatctggaagagaggtgtcaagggtgtggagtatcgtttgagattaagaatctccagaaagagaaacgaagaagaggacgctaagaatcctttattctcttacgttgaaccagttttggttgcctcagccaagggcttgcaaactgttgttgtcgaagaagatgcttaa

SEQ ID NO: 5047 - DNA, 768 bp, Artificial Sequence
  Optimized genes for Saccharomyces cerevisiae
atggccgtcggaaaaaacaagagattgtctaagggtaaaaaaggtcaaaagaagagggtggtcgatccatttactagaaaagaatggttcgacattaaggctccatccacgtttgaaaacagaaatgtcggtaagactttggtcaataagtctactggtttgaagtcggccagtgatgctcttaaaggtagagtcgttgaagtttgtttggctgacctacaaggttccgaagaccactctttcagaaagatcaagttaagagttgatgaggttcaaggcaagaacttgttaaccaactttcatggtatggatttcactaccgacaagttgagatctatggttcgtaaatggcaaaccttaatcgaagctaacgttactgtcaagacctcagatgactacgttttgagaatttttgctattgctttcaccagaaagcaagccaaccaagttaaacgtcattcttatgctcaatcttcccacattagagctatccgtaaggtcatatcagagattttgactaaggaagtgcaggggtccactctggcccaattaacaagcaaattgattcctgaagttatcaacaaggaaattgaaaatgcaacaaaggacatcttcccattgcaaaacatccatgttagaaaggttaagctattgaaacaaccaaagttcgatgttggtgccttgatggctttgcacggtgaaggttctggtgaagaaaagggtaagaaagtaaccggtttcaaggatgaagtcttggaaactgtttaa

SEQ ID NO: 5048 - DNA, 531 bp, Artificial Sequence
  Optimized genes for Saccharomyces cerevisiae
atgactgctcaacaagctccaaaatggtacccatctgaagatgttgctgccccaaagaagaccagaaaggctgtcaggcctcaaaaattgcgtgcctccttggttccaggtactgttttgatcttgttagctggtagattcagaggtaagagagttgtttacttgaagcacttggaagataacactctacttgtcactggtccattcaaggttaatggcgtaccattgagaagagtcaatgctagatacgttattgctacctccaccaaggtcagtgtggaaggtgttaacgtcgagaaattcaacgttgaatactttgccaaggagaagttgaccaaaaaggaaaagaaggaagctaacttgttcccagaacaacagacaaaagaaattaagactgaacgtgtcgaagaccaaaaggtggttgacaaagccttattggctgaaatcaagaaaacacctttactaaagcaatatttatcagcatctttctctttgaagaacggtgacaagccacatttgctgaaattttaa

SEQ ID NO: 5049 - DNA, 1152 bp, Artificial Sequence
  Optimized genes for Saccharomyces cerevisiae
atgtctgaaactgaattacgtaagagacaagctcaattcaccagagaattgcacggtgatgatatcggtaagaagactggtttgtctgctttgatgtcaaagaacaacagcgcccagaaggaagctgttcaaaagtatttgagaaactgggatggtcgtactgacaaggatgctgaagaaagaagattggaagactataatgaggcgacacattcttactacaacgtcgtaaccgatttttacgaatacggttggggttcatctttccacttctctagattctacaagggtgaatccttcgctgcaagtatagcaagacatgagcattatcttgcctacaaggctggtatccaaagaggtgacttggttttggatgtcggttgcggtgtcggcggtccagctcgtgaaattgcaaggtttacgggctgtaacgttattggtttgaacaataatgactaccaaattgccaaggctaaatactacgctaagaaatataatctatccgaccaaatggatttcgtcaagggcgacttcatgaagatggactttgaagaaaacactttcgataaggtttatgctattgaagccacttgtcacgctcctaaattggaaggtgtttactctgagatctacaaagtgttgaagccaggtggtacttttgctgtctatgaatgggttatgaccgacaagtacgatgaaaacaacccagaacacagaaagattgcttacgagatcgaactgggtgacggtattccaaagatgtttcacgttgatgttgctagaaaggccttgaaaaactgtggtttcgaagtcttagtctccgaagatttggctgacaacgatgacgaaatcccatggtactatccattgaccggtgaatggaagtacgttcaaaaccttgctaacttggccacatttttcagaacttcgtacttgggtagacaatttactaccgctatggttaccgtcatggaaaagttaggattagctccagaaggttctaaagaagttactgctgctctagaaaatgctgccgtggggctagtcgccggtggtaaatccaagttgttcactccaatgatgttattcgttgcccgtaaacctgagaatgccgaaaccccctctcaaacctcccaagaagctactcaataa

SEQ ID NO: 5050 - DNA, 636 bp, Artificial Sequence
  Optimized genes for Saccharomyces cerevisiae
atgcaagtgttgcaattatggttaaccactttgatttctttggtcgttgctgttcaaggtttgcatttcgacattgctgcctccacagacccagaacaagtttgtatcagagacttcgtcaccgaaggtcagttagttgtcgccgatattcactctgacgggtctgtcggcgatggtcaaaagttgaatctatttgtgcgtgactctgttggtaacgaatatagaagaaagagagatttcgctggtgatgttagagttgccttcactgcccctagtagcactgcttttgatgtctgttttgaaaaccaagctcaatacagaggtagatctctatccagagctatcgagctggatatcgaatctggtgctgaagctagagactggaacaagatctcagcaaatgaaaaattgaagccaattgaagttgaattacgtcgtgtcgaagaaattactgatgaaatcgttgacgagttgacttacttgaaaaacagagaagaaagattgagagataccaacgagtcgactaataggcgtgtaagaaacttctccatcttggttatcattgttttgtcttccttgggtgtctggcaagtcaactatcttaagaactacttcaagaccaagcacattatttaa

SEQ ID NO: 5051 - DNA, 411 bp, Artificial Sequence
  Optimized genes for Saccharomyces cerevisiae
atgggtagagttagaaccaagactgtcaagagagcttccaaggctttgattgaacgttactacccaaagttaactcttgatttccaaactaataaaagattgtgtgatgaaatcgccaccattcagtccaaaaggctaagaaacaagattgctggttacactacacacttgatgaagcgtatccaaaagggccctgtcagaggtatttcatttaaattgcaagaagaagagagagaaagaaaggaccaatatgttccagaagtctctgccttagatttatctagaagcaatggtgttttgaacgtcgacaaccaaaccagtgatctggttaagtctttgggtttgaagttgccattgtccgttatcaacgtttctgctcaaagagacagaagatacagaaaacgtgtgtaa

SEQ ID NO: 5052 - DNA, 441 bp, Artificial Sequence
  Optimized genes for Saccharomyces cerevisiae
atgtctctagtagtgcaggaacaaggttctttccaacacattctgaggttattgaataccaacgtcgatggtaacatcaaaattgtctacgctttgaccactatcaagggtgttggtagaagatactccaacttggtttgtaagaaggctgatgttgacttgcacaagagagccggtgaattgactcaagaagaattagagagaattgttcaaatcatgcaaaacccaactcattataaaatcccagcttggtttttgaacagacaaaatgacattactgacggtaaggactaccacactctagccaacaacgttgaatcaaaattaagagatgatttggaaagattgaagaagatcagagcacacagaggtattagacatttctggggtttgcgtgtccgtggtcaacataccaagaccacaggccgtagaagagcttaa

SEQ ID NO: 5053 - DNA, 591 bp, Artificial Sequence
  Optimized genes for Saccharomyces cerevisiae
atggttgctcaagttcaaaagcaagctccaacattcaagaagactgctgtggtcgatggtgtcttcgatgaagtttctttggataaatacaagggtaagtacgttgttttggcctttatccctctagcattcactttcgtttgtccaactgaaatcattgctttctctgaagctgctaagaaatttgaagaacaaggtgctcaggtattatttgcttctactgattccgaatactccttgttggcttggacaaatatcccaagaaaggaaggtggtttgggtccaattaatattcctttgcttgctgacaccaaccattcactgtctcgtgactacggtgtgttaattgaagaagagggcgtcgctttgagaggtctatttattattgacccaaagggagtcatcagacacattaccatcaacgatttgcccgttggtagaaacgttgacgaagcattaagattggtcgaggccttccaatggaccgacaagaacggtactgtcttgccatgtaactggactccaggtgccgccaccatcaagccaaccgttgaagatagtaaagaatatttcgaagccgctaacaaataa

SEQ ID NO: 5054 - DNA, 768 bp, Artificial Sequence
  Optimized genes for Saccharomyces cerevisiae
atggctgtcggtaagaacaagagattgtccagaggtaagaagggcttgaagaagaaagtagtcgacccatttaccagaaaggaatggttcgatatcaaggctccttcgacatttgaaaacagaaacgttggaaagacattagttaacaagtctactggtttgaagaatgcttctgatgcacttaaaggtagagtcgttgaagtttgtttggcagatttacagggttctgaagaccactctttcagaaaggttaagttgagagttgacgaagtccaaggtaagaacttgctaaccaacttccacggtatggacttcactactgacaagttaaggtccatggtgcgtaaatggcaaaccttgattgaagccaatgtcactgtcaagactagtgatgattatgtcttaagaatttttgctattgctttcacccgtaagcaagctaaccaagttaaacgtcattcttacgcccaatcttcacacattagagctatcagaaaggttattagcgagatcttgactagagaagttcaaaactccactttggctcaattgacctccaagctgattccagaagttatcaacaaagaaatcgagaatgccaccaaggacattttcccattgcaaaatatccatgttagaaaagtgaaattgttgaaacaaccaaagtttgatgttggtgctttgatggccttacatggtgaaggttccggtgaagaaaagggtaaaaaggtctctggtttcaaggatgaagtcttggaaactgtttaa

SEQ ID NO: 5055 - DNA, 531 bp, Artificial Sequence
  Optimized genes for Saccharomyces cerevisiae
atgtctgctcaaaaggctccaaagtggtacccatctgaagatgttgctgctttgaagaagaccagaaaggccgctagaccacagaaattgagagcttcattagttccaggtactgttttgatcttattggctggtagattcagaggtaagagagtcgtctatttaaagcatttggaagataacactttgttgatttccggcccattcaaggttaacggtgttcctcttcgtcgtgtgaatgccaggtacgttatcgccaccagtaccaaggtctccgtcgaaggtgtcaacgtcgagaaattcaacgttgaatactttgccaaggagaaattaacaaagaaagaaaaaaaggaagctaacttgttcccagaacaacaaaacaaggaaattaaggcagaaagagtagaagaccaaaaagttgttgacaaagcactgattgctgaaatcaagaagactccactactaaagcaatacttgtccgcttctttctctttgaagaatggtgacaagcctcacatgttgaaattttaa

SEQ ID NO: 5056 - DNA, 180 bp, Artificial Sequence
  Optimized genes for Saccharomyces cerevisiae
atgttgaagagattcccaactccaattttgaaagtctactggccattctttgttgctggtgctgccgtctattacggtatgtctaaggctgctgacttatcctctaacaccaaggaattcatcaacgatcctcgtaatccaagatttgccaagggtggtaagttcgttgaagttgattaa

SEQ ID NO: 5057 - DNA, 960 bp, Artificial Sequence
  Optimized genes for Saccharomyces cerevisiae
atggctagtaatgaggtcttggttttgagaggtaccttggaaggtcataacggttgggttacttcattagctacctcagcaggacagcctaatctattgttgagcgcaagccgtgataaaacattgatttcctggaagttgactggcgatgaccaaaagttcggtgttccagtccgttcctttaaaggccactctcatattgttcaagactgtaccttgaccgctgacggtgcttacgctttgtctgcttcttgggacaaaacgttaagattgtgggatgttgctactggtgaaacttaccaaagattcgttggtcacaagtctgatgtcatgtctgtcgatattgacaagaaggcctccatgattatttctggttctagagacaagaccattaaggtctggactatcaagggtcaatgtttggccacccttttgggtcacaatgactgggtttctcaagtaagggtcgtgcctaacgaaaaggctgatgatgactctgttaccatcatctctgccggtaacgataagatggttaaagcatggaatttgaaccaattccaaattgaagctgatttcattggtcacaactccaacatcaacactctaacagcgtctccagatggtactctcattgcttccgctggtaaggacggtgaaatcatgttatggaacttagccgccaagaaagctatgtacaccctaagtgctcaagatgaagtcttttccttggctttctccccaaacagatactggttagccgctgccactgccacaggtatcaaggttttctctttggacccacaatatctggtggacgatttgagaccagaatttgctgggtattccaaggctgctgaaccacatgctgtttcattagcttggtcggccgatggtcaaactctgtttgccggttacactgacaacgtcatcagagtttggcaagttatgactgctaactaa

SEQ ID NO: 5058 - DNA, 255 bp, Artificial Sequence
  Optimized genes for Saccharomyces cerevisiae
atggctagttcgacatctacctctgcaagtgcatcatcatccatcaagaccaactctgctttggtttccaacaacgttgtcgccgcttcctctgtttctgccacttctactgcttcttcttccgctgccaagaacaccacttccagctctaaaaatgctgctccaggtatggttgctaatccagtctcctccaagtacggtatcattatggccgcctttgctgctgtctctttcgtgttaggtactggtatttaa

SEQ ID NO: 5059 - DNA, 600 bp, Artificial Sequence
  Optimized genes for Saccharomyces cerevisiae
atggctatctccaagaacttgccaatcttgaaaaaccatttcagaaagcattggcaagaaagagttaaagtccactttgaccaagctggtaagaaggtttctcgtagaaatgctcgtgcggcaagggccgctaagattgccccaagaccattggatctgttaagacctgtagtgcgtgctccaactgttaagtacaaccgtaaggtcagagccggtagaggtttcacccttgccgaagtcaaggctgctggcctaactgctgcttacgctagaaccattggtatcgctgttgaccacagaagacaaaacagaaaccaagaaatcttcgacgctaacgttcaaagattgaaggaatatcagtcaaagatcattgtctttcctagagatggtaaagctccagaagctgaacaagttttgtccgctgccgccactttcccaattgctcaaccagctactgatgttgaagccagagctgtccaagataatggtgaatctgctttccgtacattgagattagccagatctgaaaagaagtttaggggtattagagagaagagagcaagagaaaaggccgaggcagaagctgaaaaaaagaaataa

SEQ ID NO: 5060 - DNA, 2118 bp, Artificial Sequence
  Optimized genes for Saccharomyces cerevisiae
atggctggtgaaaccttcgaattccaagctgaaattacccaattgatgtctttgattattaacactgtttattcaaacaaggaaatcttcttacgtgaattaatttccaacgcttctgacgcgcttgacaagattcgttaccaagctttgtccgacccaaagcaattggaaaccgaaccagatctgttcattagaatcacccctaaacccgaagaaaaagttttggaaataagggattccggtattggtatgactaaggcagagttaatcaacaacttgggtactattgccaaaagcggcaccaaggctttcatggaagcccttagtgccggtgccgatgtttccatgatcggtcaatttggtgttggtttctactctttgtttttggttgctgatagagtccaagtcatttctaagaacaatgaagatgaacaatacatctgggagtctaacgcagggggctcgtttaccgtcactttggacgaagttaacgaacgtattggtagaggtaccgtgttgagattattcttgaaggatgaccaattagaatacttggaagagaaaagaatcaaggaagtcatcaagagacactccgaatttgtcgcttacccaatccaattgctagtaacgaaggaagtagaaaaagaagtcccaattccagaagaagaaaagaaggacgaagaaaagaaagatgaagatgataaaaaaccaaagctagaggaggtcgatgaggaagaagaagagaagaagcctaagaccaagaaggtcaaggaagaagttcaagaattggaagaattaaacaagacaaagccattatggaccagaaacccatctgatatcactcaagaggaatacaacgccttttacaagtctatcagtaacgactgggaagaccctttgtacgttaagcatttctctgttgaaggacagctcgaattcagagctattttgttcatcccaaagcgtgctcctttcgatttatttgaatccaagaagaagaagaataatatcaagttgtacgttagaagagtttttattactgacgaggctgaagacctgattcctgaatggttgtctttcgttaagggtgtggtagattctgaagacttgccattgaatttatccagagaaatgttgcaacaaaataagatcatgaaggttatcagaaagaatattgttaagaagctcattgaagctttcaacgaaattgctgaagatagcgaacagtttgacaagttctattccgcttttgccaagaacatcaaattaggtgtccacgaagatactcaaaacagagccgctttggctaagttgttgagatacaatagcaccaaatccgttgacgaattgaccagtctaacagactatgttactagaatgccagaacatcaaaagaacatctactatatcactggtgaatctttaaaggccgtggaaaagtccccattcttggatgctttgaaggctaaaaacttcgaagtcttgttccttactgatcctattgatgaatatgccttcactcagttgaaggagtttgaaggtaagaccttggtcgacattacaaaggacttcgagctagaagagaccgatgaagaaaaagcagaaagagaaaaggaaattaaggaatatgaaccattgacaaaagccttgaaagacatcttgggtgatcaagttgaaaaggttgttgtctcttacaaattgttagacgctccagctgctatcagaaccggtcaattcggttggtctgctaacatggaaagaattatgaaagcacaagccttaagagactcttctatgtcctcatacatgtcttccaaaaagactttcgaaatctctccgaaatctccaattataaaagaattgaaaaagagggtggacgaaggtggtgctcaagacaaaactgtcaaggatttgaccaacttactttttgagactgccctgctaacatctggtttctcactggaagagccaacttcttttgcttcgcgtatcaatagattgatttcactaggtttgaacattgacgaggatgaagaaactgaaactgctccagaagcttccactgaggcaccagtcgaagaagttccagctgacactgaaatggaagaagttgattaa

SEQ ID NO: 5061 - DNA, 303 bp, Artificial Sequence
  Optimized genes for Saccharomyces cerevisiae
atgaccgtcaagactggtattgctattggtttgaacaagggtaagaaagtgacatccatgactcctgctccaaagatctcttataaaaaaggtgctgcttccaacagaaccaagtttgtcagatctttggttagagagatcgctggtttatctccatacgaaagaagattgattgatttgatcagaaatagtggtgaaaagagagccagaaaggttgccaagaagcgtctaggctctttcactagagctaaggctaaagttgaagaaatgaacaacatcattgccgcatcacgtagacactaa

SEQ ID NO: 5062 - DNA, 669 bp, Artificial Sequence
  Optimized genes for Saccharomyces cerevisiae
atgaaattcttcccattgcttttattgattggtgttgtcggttacatcatgaacgttttgtttacgacctggttacctaccaactacatgtttgacccaaagactttgaacgaaatctgtaattcagtaatctctaagcacaatgcagcagagggcctgagcactgaagatttgttgcaagatgtccgtgatgctttggcttctcactacggtgacgaatatatcaacagatatgtcaaggaagaatgggttttcaacaatgctggtggtgctatgggtcaaatgattattctacatgcctccgtttctgaatacttaattttgttcggtactgctgttggtacagaaggtcacactggagtgcactttgctgatgattatttcactatcttgcacggtacccagattgctgctttaccatacgctaccgaagctgaagtctacacccctggtatgactcatcatttgaagaagggttatgccaaacaatactccatgccaggtggttctttcgccttagagcttgctcaaggttggattccatgtatgttgccatttggtttcttggacactttctccagtacactagacttgtacactttatacagaactgtttacttgaccgccagagacatgggtaagaacttgctacaaaacaagaaattttaa

SEQ ID NO: 5063 - DNA, 2880 bp, Artificial Sequence
  Optimized genes for Saccharomyces cerevisiae
atgactgttaccactccattcgttaacggtacttcatactgtaccgtcaccgcttactcagtgcagtcttacaaggctgctattgacttctacaccaagttcttgagtttggaaaacagatcttcacctgacgaaaattcaactttgttgagcaacgattctatttctttgaaaatcttgttaagaccagatgaaaagatcaacaagaatgttgaagctcacttgaaggaattgaactccatcactaagactcaagattggagatcacatgctacgcagtcgcttgttttcaacacctccgatattttggctgttaaagatacgctgaatgctatgaatgccccgttgcaaggttacccaactgaattattcccaatgcaattatacactttggacccattgggtaatgtcgttggtgttacttccacaaagaacgcagtatcgacaaaacctactcctccaccagccccagaagcttctgctgagtcgggactaagctccaaggttcactcttatactgatttagcttacagaatgaaaactaccgatacttaccctagcttaccaaagcctttgaatagacctcaaaaagccatcgctgtaatgacctctggtggtgatgctccaggtatgaactctaacgtgagggccatagtacgttctgccatcttcaagggttgtagagcttttgtcgttatggaaggatatgaaggtctagttagaggtggtccagaatacatcaaagaattccattgggaagatgtgaggggctggtccgctgaaggtggtactaacattggtaccgccagatgcatggagtttaagaagagagaaggccgtttgctaggtgctcaacacttaattgaggcaggcgtcgatgccctgattgtttgcggtggtgacggttccttaaccggtgccgatttgtttagatctgaatggccaagcctcatcgaagaattgttgaagacaaaccgcatatccaatgaacaatacgaacgtatgaagcatctaaacatctgtggtactgtcggtagcatcgataacgacatgtccacgactgacgctactatcggtgcttactctgccttggatagaatttgtaaggctattgactacgttgaggctacagccaactcccactccagagcatttgttgtcgaagtcatgggtagaaactgtggttggttagcactacttgctggtatcgccactagtgctgactatatttttattccagaaaaacctgcgacttcttccgaatggcaagaccaaatgtgtgacatcgtttctaagcacagatcccgtggtaagagaactactattgttgttgttgccgaaggtgccattgctgctgacttgaccccaatctctccatctgatgtccacaaggtcttggtcgacagattaggtttagacaccagaattaccaccttgggtcacgttcaaagaggtggcactgctgttgcttatgacagaatactagctactttacaggggttggaagctgtcaatgcagtattagaatctactccagacacaccatccccattaatcgcagtgaacgagaataagatcgtcagaaagccattgatggaaagtgtcaaactgaccaaggctgtcgctgaagctatccaagccaaggatttcaagagagccatgtctttgagagataccgaattcattgaacatttaaacaatttcatggccattaattctgctgaccacaacgaaccaaagttgcctaaggacaaaaggttgaagattgcaattgtcaacgttggagctccagctggtggtattaacagtgcggtttattccatggctacctactgtatgtctcaaggtcatagaccatacgctatctacaatggttggtctggtttggctagacacgaatctgttcgttcattgaactggaaggatatgttgggttggcaatctagaggtggtagtgaaattggtaccaaccgtgtcactcctgaagaagcagaccttggtatgattgcctactacttccaaaagtacgaatttgacgggttgattattgtcggtggatttgaagcctttgagtcattgcaccaactggaaagagctcgtgaatcctacccagctttcagaatccccatggttttgatcccagctaccctttccaacaacgtcccaggtacagagtattctctagggtctgacactgctttgaacgctttaatggaatattgtgatgttgttaagcaaagtgcctcttctaccagaggtagggctttcgtcgttgactgtcaaggcggtaactccggttatttggctacttatgcttccctagccgttggtgctcaagtttcctatgttccagaggagggtatttccttggagcaattgtcagaagacattgaatacttggcccaatctttcgaaaaggctgaaggtcgtggtagattcggtaaattgatcttaaagtctaccaacgcctccaaagctttgtctgctaccaaacttgcggaagttatcaccgctgaagctgatggtagatttgatgctaagccagcataccccggccatgtccaacaaggtggtttgccatctccaattgatcgtacacgtgccacaagaatggctattaaggccgtcggtttcatcaaggacaaccaagctgccattgctgaagccagagctgcagaagaaaacttcaatgctgatgacaagaccatctccgacactgccgctgtggtgggtgtcaagggctctcatgttgtctacaactctatcagacaattgtacgattatgaaactgaagtctctatgagaatgccaaaagttattcactggcaagctactagattgattgctgatcatttggttggtagaaaaagagttgattaa

SEQ ID NO: 5064 - DNA, 804 bp, Artificial Sequence
  Optimized genes for Saccharomyces cerevisiae
atgtctcaaggtagaaaggccgccgaaagattggccaagaagaccgtattaattacaggtgcttcagcaggtattggtaaagcaactgctctagaatatttggaagcttccaacggtgacatgaaattaatcttggctgctagaagattagaaaagttggaagagttgaagaaaaccattgaccaagaattcccaaatgctaaggttcacgttgctcaattggatatcactcaagctgaaaaaatcaagccattcattgaaaacttacctcaagagttcaaggacattgatattctggttaacaacgctggtaaggctttgggaagcgacagagttggtcaaatcgccactgaagatatccaagatgtgtttgacaccaacgtcaccgcgctaatcaacatcacccaagctgttttgccaattttccaagccaagaactctggtgatattgtcaacttgggttctattgccggccgtgatgcttacccaactggttccatttactgtgcttctaagtttgctgtcggtgccttcactgactctttgagaaaggaattgattaataccaagatcagagtcattttgatcgctccaggtttggttgaaactgagttttccttggtcagatacagaggtaacgaagaacaagccaaaaatgtttataaagataccactccattgatggctgatgatgttgctgacttaatcgtctacgctacaagtcgtaagcaaaacactgttattgcagacacgcttatatttcctactaatcaggcctctccacaccatatcttcaggggctaa

SEQ ID NO: 5065 - DNA, 519 bp, Artificial Sequence
  Optimized genes for Saccharomyces cerevisiae
atggcccatttcaaggaataccaagttatcggtagaagattgccaactgaatctgttccagaaccaaagttgttcagaatgagaatctttgcatcaaatgaagttattgccaagtcccgttactggtactttttacaaaagttacacaaggtgaagaaggcttccggtgaaattgtctccatcaaccaaatcaacgaagctcatcctaccaaggtcaagaacttcggtgtctgggttagatacgatagcaggtctggtactcacaacatgtacaaggagatcagagacgtatctcgtgtcgctgctgttgaaaccctatatcaggacatggctgccagacacagagctagattccgttctattcacattttgaaagttgctgaaattgaaaagactgctgatgttaagagacaatatgtcaagcaatttttgaccaaagatttgaagttcccacttcctcatagagttcaaaaatccacgaaaactttctcttataaaagaccaagtacattctactaa

SEQ ID NO: 5066 - DNA, 180 bp, Artificial Sequence
  Optimized genes for Saccharomyces cerevisiae
atgaaattgtctcaagttgttgtctctgctgtcgcctttactggtctagtctccgctgccaatagttccaactcttcttcatccaagaacgctgctcaaccaattgctggtttgaacaacggtaaggttgccggcgccgcaggtgttgctttggctggtgctttagctttcttgatctaa

SEQ ID NO: 5067 - DNA, 183 bp, Artificial Sequence
  Optimized genes for Saccharomyces cerevisiae
atggctaacaaggtcattcaattgcaaaagatcttccaatcttccaccaagccattatggtggagacaccctcgttctgctttgtatctatacccattctacgctatttttgcagttgctgtcgttactccattgttgtacattccaaatgccatcagaggtatcaaagccaagaaggcttaa

SEQ ID NO: 5068 - DNA, 594 bp, Artificial Sequence
  Optimized genes for Saccharomyces cerevisiae
atgatgcacttcagaaagaagtcaagtatttctaacacttccgaccacgatggcgccaatagagcttctgacgtcaagatctctgaagatgacaaggctagattgaagatgagaactgctagcgttgctgatccaattctagatgccgtccaagaagctcaaccattcgaacaagctgctgacactttccatgacaacatgaacagacaatcttatttttcaaatgaggaaggtcacgttttgtgtgatgtctttggtcaacctattactcaagccgatatctccaacccaacaagggcacgtgatgaaagaccattggacaccatcagatcctttgaatacgctgtttctggtgacccagtctgggctcaacaattggaaaccccaacctatggtttccgtgttagacccgacttcccagttttcggtgctgccgtgacctacgatgctaacggtatgccacagcaagttggtggtgcctcctctcaaatgtacggtgaacaggcagtataccaacctcaacaacatgttcaaactgaagaaaagcaaaagaagaaaaaaaagggtttattcggtagaatgaagaaaaaataa

SEQ ID NO: 5069 - DNA, 1680 bp, Artificial Sequence
  Optimized genes for Saccharomyces cerevisiae
atgttgttcaagtctttatctaagttggctacagcagctgctttcttcgctggtgtagcaacggctgatgacgttccagctattgaagtcgttggtaataagttcttttattccaacaatggttctcagttctacatcagaggtgttgcctaccaagccgacaccgctaacgaaacatctggatctactgtcaacgaccccctggccaattatgaatcctgctctcgtgatattccttatctaaagaaattgaacactaacgttattagagtttacgctatcaacaccactttggaccactccgaatgtatgaaggctttaaacgacgctgatatctacgttatcgcagacttggccgctcctgcgacttccatcaacagagatgacccaacctggaccgttgacttatttaactcttacaagactgttgtcgacactttcgccaactacaccaatgttttgggtttcttcgcaggtaacgaggtgacgaacaactacactaataccgatgctagtgcctttgtcaaggctgcgataagggacgtcagacaatacatttcagacaagaattacagaaagatcccagtcggttactcctctaacgatgatgaagatactcgtgttaagatgaccgactactttgcttgcggtgacgatgatgtgaaagctgacttctatggtatcaacatgtacgaatggtgtggtaagtccgactttaagacctccggttatgctgacagaactgctgaattcaagaacttgtccattccagtttttttctctgaatacggttgtaatgaagttaccccaagattattcactgaggttgaagctttgtacggttcaaatatgactgatgtctggtctggtggtattgtctacatgtattttgaagaaaccaacaaatatggacttgtttctatcgatggtaacgatgtcaagacattagatgatttcaacaactattcatcagaaattaacaagatttcccctacatcagctaataccaagtcttattctgcaactacctcagatgttgcttgtccagccactggtaaatactggtccgctgctactgaattgccaccaactccaaacggtggtttgtgttcatgcatgaacgctgctaactcttgtgttgtctctgacgacgtagactctgatgattacgaaactcttttcaactggatttgtaacgaagtggactgttccggtatctctgccaacggtacagctggtaagtacggtgcttactctttctgtaccccaaaggaacaattgtctttcgtcatgaatttatactacgagaaatctggtggttctaaatccgattgttccttttcgggctccgccaccttgcaaactgctactactcaagcttcctgttcttctgctttgaaggaaatcggttccatgggtactaactccgcctctggctctgttgatttgggcagtggtaccgaatcttccactgcatcttctaatgcttctggttcttcaagtaaaagcaattcaggttcctctggctcgtcctccagctcgagtagctcttctgcttctagcagtagctcctccaagaagaacgccgccacaaacgtcaaagccaatctagctcaagttgttttcacctctattatttctttgagtattgctgccggtgtcgggtttgccctagtgtaa

SEQ ID NO: 5070 - DNA, 411 bp, Artificial Sequence
  Optimized genes for Saccharomyces cerevisiae
atggctagaaccaagcaaactgctcgtaaatctactggtggtaaggctccaagaaaacaattggcttccaaggccgcaaggaaaagtgccccatctacaggcggtgtcaagaagcctcacagatacaagccaggtactgttgctcttcgtgagatcagaagattccaaaagtcaactgaattgttgattagaaagttgccattccaaagattggtcagagaaattgctcaagatttcaagactgacttgagatttcagagctctgctattggtgctttgcaagaatctgttgaagcttatttagtgtccttatttgaagacaccaacttggccgccattcatgctaagagagttaccatccaaaaaaaggatatcaagctagcacgtagattaagaggtgaaagatcctaa

SEQ ID NO: 5071 - DNA, 852 bp, Artificial Sequence
  Optimized genes for Saccharomyces cerevisiae
atgtctccaccagtttactctgacatttctagaaacatcaacgatttattaaacaaggatttctaccacgctactccagctgcttttgacgtccaaactacaactgctaacggtatcaagttcagtcttaaggccaaacagcctgtgaaagatggtccattgtccactaatgttgaagctaagttgaacgacaagcaaactggtttgggtttaacccaaggttggtccaacaccaacaacttgcaaaccaagctagagtttgccaatttaacacccggattgaagaacgaattgatcacttccttgactcctggtgttgctaaatctgccgttttgaacactaccttcactcaaccattcttcaccgctagaggtgccttcgatttgtgtttgaaatcacctacgtttgtcggtgacttgaccatggctcacgaaggtatcgtcggtggtgctgaattcggttacgatatctctgctggttccatttcccgttatgctatggccctgagctatttcgcaaaggactactcacttggggcaaccttgaataatgaacaaattaccactgttgactttttccaaaacgttaatgctttcttgcaagttggtgccaaggcaacaatgaactgtaagttaccaaactccaatgtcaacattgaatttgctaccagatacttgccagatgcctcctctcaagtcaaggctaaggtttctgatagtggtattgttactttggcttacaagcaattgttgagaccaggtgtcactttaggcgtgggttcttcgtttgatgctttgaagttgtctgaaccagtacataaactaggctggtctctatctttcgacgcttaa

SEQ ID NO: 5072 - DNA, 1230 bp, Artificial Sequence
  Optimized genes for Saccharomyces cerevisiae
atggttaaggaaaccaagttttatgacattttgggtgtcccagttactgcaacagacgtggaaattaagaaggcctacagaaagtgtgctttgaaataccacccagacaagaacccatccgaggaagccgctgaaaagttcaaggaagcttcagctgcttacgaaatcttatctgaccccgaaaaacgtgatatctacgaccaatttggtgaagacggtttgtccggtgcaggaggcgctggtgggtttccggggggaggtttcggtttcggcgacgatattttttctcaattcttcggtgctggtggtgcccagagacctaggggtcctcaaagaggtaaggacatcaagcacgaaatttccgcaagcttagaggaattgtacaagggtagaactgccaagttggccttgaacaagcaaatcttatgtaaagagtgtgaaggcagaggtggtaagaagggtgctgtcaagaagtgcacctcatgtaacggtcaaggtatcaaatttgttaccagacaaatgggtccaatgattcaaagattccaaactgaatgtgatgtgtgccacggtactggtgacattattgacccaaaggacagatgtaagtcttgtaatggtaagaaagtcgaaaacgaacgtaagatcttagaagttcatgttgaaccaggtatgaaggatggccagcgtatcgttttcaaaggcgaagctgatcaagccccagatgttatcccaggtgatgtcgtctttattgtctccgaaagaccacacaagtctttcaagagagatggtgatgatttggtttacgaggcggagattgatctactaacagctatcgccggtggagaattcgctctggaacatgtctctggtgactggttgaaggttggtattgtacctggtgaagtcattgctccaggtatgagaaaggtcatcgaaggtaaaggtatgccaattccaaagtatggtggttacggtaacttgattataaaattcactatcaagttcccagaaaatcatttcacctctgaagagaatcttaaaaaattggaagaaatcttgccaccaagaattgttccagctattcctaaaaaggctactgttgacgaatgtgttttggctgactttgatcctgctaagtacaacagaaccagagcttctcgtggtggtgctaactatgatagtgatgaagaagaacaaggtggtgaaggtgttcaatgtgcctcccaataa

SEQ ID NO: 5073 - DNA, 597 bp, Artificial Sequence
  Optimized genes for Saccharomyces cerevisiae
atgtctcaaccagttgtcgttattgatgccaaggaccacttgttgggtagattagcttctactattgctaagcaagttttgaatggtcaaaagatcgttgtggttagagccgaagctttgaacatctctggtgaattcttcagaaacaaattaaaatatcatgattttttgagaaaggctaccgcttttaacaagactcgtggtccattccatttccgtgctccatctagaatcttgtacaaggccatcagaggtatggtttcccacaagaccgccagaggtaaggctgctctggagagattgaaaatttttgaaggtattcctccaccatacgacaagaagaagagagtcgtggtacctcaagctctaagagttttaaggctaaagccaggaagaaagtacaccacacttggcaaattgagcacttccgtcggttggaagtatgaagatgtcgtcgcaaagttggaagacaaacgtaaggtcagatccgctgaatactacgctaagaagagagctttcactaagaaagtttcttctgcttcagccgccgcaagtgaatctgatgttgctaaacagttggcttccttcggttactaa

SEQ ID NO: 5074 - DNA, 1449 bp, Artificial Sequence
  Optimized genes for Saccharomyces cerevisiae
atgtctgcctttgttagggtggtcccaagaatttccagatccagcgtattaaccagatcactacgtttacaattacgttgctatgcttcctacccagaacacactatcatcggtatgccagctttgtcgcctaccatgactcaaggtaacttggctgcttggactaagaaggaaggtgaccaattgagcccaggtgaagttatcgctgaaatcgaaactgacaaagctcaaatggactttgaatttcaagaggatggttatttggccaagatcctagtgcccgaaggcaccaaggacatcccagtcaacaagccaattgccgtctacgttgaggataaggctgacgttcctgctttcaaagatttcaagctagaagactctggttctgattctaaaacttccactaaagcccagcccgctgaaccacaagctgaaaaaaaacaagaagccccagccgaagaaaccaagacttctgctccagaagctaagaagtctgacgtcgccgcaccacagggccgtatttttgcatccccactggctaagacaattgctctcgaaaagggtatcagccttaaggatgttcacggtactggtccaagaggtagaattacgaaggctgatattgaatcttacttggaaaagagttcaaagcaatcttctcaaacctccggtgccgccgctgcaacaccagctgcggcaacatcttccaccactgctggttccgctccatcccctagttcgacagcttcttacgaagatgttccaatctcaacaatgagatctatcattggtgaaagattattgcaatctacccaaggtattccatcttatattgtctcctctaagatttctatatcaaaattgttgaagttgagacaatccttgaacgccactgccaacgacaagtacaagttgtctattaacgatttgttggtcaaggccatcactgtggccgccaaacgtgttccagacgctaacgcttactggttgccaaatgagaatgttatcagaaagttcaagaatgtcgatgtctctgtcgctgttgccactccaaccgggctgcttactcctattgtaaagaactgtgaagcaaaaggtttgtcccaaatctctaacgaaattaaggagttagttaagagagctagaatcaacaaattagctcctgaagaattccaaggtggtaccatctgtatctccaatatgggtatgaacaatgctgttaacatgttcactagtattatcaatccacctcaaagtaccattttggctattgctactgttgaaagagttgctgtcgaagatgctgctgctgaaaacggtttctctttcgacaaccaagttaccattaccggtactttcgatcatagaactattgacggtgctaaaggagcagagtttatgaaggaattgaagaccgttattgaaaacccattggaaatgttgttataa

SEQ ID NO: 5075 - DNA, 1860 bp, Artificial Sequence
  Optimized genes for Saccharomyces cerevisiae
atggtcaaggaatctattattgctttggctgaacacgctgcttccagagcttcaagagtcattccacctgtcaaattagcttacaagaacatgttgaaagacccttccagcaagtacaagccattcaacgctccaaagttgtccaatagaaagtggccagacaacagaattactagagctcctagatggttgtctaccgatttaagagatggtaaccaatctctacctgatccaatgtccgttgagcaaaagaaagaatacttccacaagctagtcaacattggtttcaaggaaattgaagtttctttcccatctgccagtcaaactgattttgacttcaccagatacgctgttgaaaacgccccagatgacgtctctatccaatgtctggtccaaagcagagaacacttgatcaagagaactgtcgaggccttaactggtgccaagaaggctaccatccatacttacttggcaacctccgatatgttcagagaaatcgtctttaatatgtctagggaagaggcaatttctaaggccgtggaagctaccaagttagttcgtaaattgactaaggacgatccctctcaacaagctacacgttggtcttacgaattcagtccagaatgtttctccgacactccaggtgaatttgcagtcgaaatctgtgaagccgttaaaaaggcttgggaaccaaccgaagaaaacccaatcatcttcaacttgccagctaccgttgaagtcgcgtctccaaacgtctacgccgaccaaatcgaatattttgctacgcatatcactgaaagagaaaaggtttgtatctctacacattgtcacaacgatagaggttgcggtgttgctgccactgagttgggtatgcttgctggtgctgacagagtagaaggttgtttgttcggtaacggtgaacgtacaggcaacgttgacttggttactgttgccatgaacatgtacactcagggcgtatcaccaaatctggatttctctgatttgacctctgttttggatgttgttgaaagatgtaacaagattccagttagccagagggctccatacggtggtgacctagtggtttgcgctttctcaggatctcatcaagatgctattaagaaaggcttcaatttgcaaaacaagaagcgtgctcaaggtgaaactcaatggagaatcccttatcttccgttggacccaaaggatatcggtagagactatgaagctgtcatcagagttaactcccaatccggcaagggtggtgctgcatgggttattttgagatctttgggtttggacttaccaagaaacatgcaaatagagttttcttccgctgttcaagaccacgcagactctttaggtcgtgaattgaagtctgacgaaatttccaagttgtttaaagaggcttacaactataatgatgaacaataccaagccatttcgctagttaattacaatgtggagaaatttggtactgaacgccgtgttttcactggtcaagttaaggtcggtgatcaaattgtcgacattgaaggtaccggtaatggtccaattagttccttggtcgatgccctctctaacttgttgaacgttagattcgccgtcgctaactacaccgaacattcattagggtccggttcctcgacacaggccgcttcttatatccacttatcctacagaagaaatgctgataacgaaaaagcatataaatggggtgttggtgtgtctgaagacgtaggagattcatccgtcagagccatctttgccaccattaacaacatcattcactctggtgatgtctccattccttctttggctgaagttgaaggtaagaatgctgctgcgagtggttctgcttaa

SEQ ID NO: 5076 - DNA, 345 bp, Artificial Sequence
  Optimized genes for Saccharomyces cerevisiae
atgtctgaagttattgaaggtaacgtcaaaattgacagaatctctccaggtgacggtgctactttcccaaagactggtgatttagtcaccattcactataccggtactttggaaaacggtcaaaagtttgacagttctgttgatcgtggttccccattccaatgtaatattggtgttggccaagttatcaagggttgggatgtcggtatcccaaaattatcagtgggtgaaaaggccagattgaccatccctggcccatacgcttacggtccaagaggtttccctggtttgattccaccaaactccacactagtctttgatgttgagttgttgaaggttaactaa

SEQ ID NO: 5077 - DNA, 117 bp, Artificial Sequence
  Optimized genes for Saccharomyces cerevisiae
atgcaaccaattaccactgcctccacccaagctactcaaaaggataaatcttctgaaaagaaggacaactacatcatcaagggtttgttctgggatccagcttgtgttattgcttaa

SEQ ID NO: 5078 - DNA, 321 bp, Artificial Sequence
  Optimized genes for Saccharomyces cerevisiae
atggttaacgttccaaagaccagaaaaacttactgtaaaggtaagacttgtcgtaagcacactcaacataaagtcacccaatacaaggctggtaaagcttccttatttgcccaaggtaagagaagatatgacagaaagcaatctggtttcggtggccaaactaagccagttttccacaagaaggccaagaccaccaagaaggttgtgctaagattggaatgtgtcaagtgtaagacaagagctcaattgactttgaagcgttgcaagcatttcgaattgggtggtgaaaagaaacaaaagggtcaagctttacagttttaa

SEQ ID NO: 5079 - DNA, 723 bp, Artificial Sequence
  Optimized genes for Saccharomyces cerevisiae
atggttgccttaatttccaagaagagaaagttggttgctgatggtgttttctatgcagagcttaacgaatttttcaccagagaattagcagaagaaggttactctggcgttgaagtcagagttactccaaccaagactgaagttatcatcagagctacccgtactcaagatgttttgggtgaaaacggtagaagaatcaatgaattgactttactagttcaaaagagattcaagtacgccccaggtaccattgtcttgtacgctgaaagagtccaagacagaggtttgtctgcggtcgctcaagctgaatctatgaaattcaaattgttgaacggcctagccattcgtagggctgcttacggtgttgttagatatgtcatggaatcaggtgctaagggttgtgaagtagtcgtttccggtaaactgcgtgctgccagagccaaggctatgaagttcgctgacggatttttgattcatagtggtcaaccagttaacgattttattgacactgctacaagacacgtgttgatgagacaaggtgtcttaggtatcaaggtcaagatcatgcgtgatcctgcaaaatccagaactggtccaaaagctttgccagatgctgtcactatcattgaacccaaggaagaggagccaattttggctccatctgttaaggactacagaccagctgaagaaaccgaagcccaggccgaacctgtggaagcttaa

SEQ ID NO: 5080 - DNA, 600 bp, Artificial Sequence
  Optimized genes for Saccharomyces cerevisiae
atgtctgccaacgaattctactcttccggtcaacaaggccagtacaaccaacaaaacaatcaagagaggactggtgctccaaacaacggtcaatacggtgctgataacggtaacccaaatggtgaaagaggtttgtttagtaccattgttggtggaagcgccggtgcttacgctggttctaaggtctccaataatcattcaaaattatctggtgttttgggtgccattggtggcgctttcttggctaacaagatctctgatgaaagaaaggaacacaagcaacaagaacaatatggtaactccaacttcggtggtgcaccacaaggtggtcacaacaaccatcacagacaagacaacaacaacaataatggtggtttcggtggacctggtggtccaggtggtcaagggttcggtcgtcaaggtcctcaaggtttcggtggtcccggtccacaggagtttgggggcccaggtggacagggatttggtggtccaaaccctcaagaatttggtggtccaggtggccaaggttttggcggtccaaatccacaagaattcggtggtcaaggtagacaaggtttcaacggtggttccagatggtaa

SEQ ID NO: 5081 - DNA, 1842 bp, Artificial Sequence
  Optimized genes for Saccharomyces cerevisiae
atggctgaaggtgttttccaaggtgctatcgggattgacttgggcacgacttactcttgtgttgctacctacgaatcctctgtcgaaatcattgctaacgaacagggtaacagagtcactccatctttcgttgccttcacacctcaagaacgcttaattggtgacgctgctaagaatcaagctgccctgaatccaagaaatacagtctttgatgctaagagattgatcggtagaagattcgacgatgaaagtgtgcaaaaggacatgaaaacttggccattcaaggttatcgatgtcgatggtaatcccgtcatcgaagtgcagtatttagaggaaaccaagactttttctccacaagaaattagtgccatggttttgactaaaatgaaggaaatagcagaggcaaaaattggtaaaaaggtggaaaaggcagttattactgttcctgcttacttcaacgatgctcaaagacaagccacaaaagacgctggtgctatttctggtttgaatgttttaagaattattaacgagccaaccgcggccgccatcgcttacggtttgggtgccggtaagtctgaaaaagaaagacacgttttgattttcgatttgggtggtggtactttcgatgtttccctgttacatattgccgggggcgtttacactgtcaagtccacttccggtaacactcatttgggtggtcaagattttgataccaacttgttggaacacttcaaggctgaattcaagaagaagaccggattggacatttccgatgacgctcgtgccttgagaagattaagaaccgctgccgaacgtgctaaaagaactttgtcatctgttactcaaaccactgttgaagtcgactctttgtttgacggtgaagatttcgaatcttcgctaaccagagctagatttgaggatttgaacgctgctttattcaaatccaccttagaacctgttgaacaagttttgaaggatgccaagatctctaaatctcaaatcgacgaagttgtcttggtgggtggttccacaagaatcccaaaggtccaaaaattgcttagcgacttctttgatggaaagcaattggaaaaaagcatcaacccagatgaagctgtcgcatatggtgcggccgttcaaggcgccattttgaccggtcaatctacttctgacgaaactaaggaccttctattacttgacgtcgctccattgtctttaggtgtcggtatgcaaggtgatatcttcggtattgtcgtcccaagaaacaccacagttccaactatcaagcgtcgtacattcactaccgtttctgataatcagaccacggtacaattcccagtctaccaaggtgaaagagttaactgtaaggaaaacactctactaggtgagtttgacttaaagaacattccaatgatgccagctggtgaaccagtactagaagctatttttgaagttgacgccaacggtatcttgaaggttactgctgtagaaaagagcactggtaagtcgtccaacatcaccatctccaatgctgttggtaggttgtcctcagaagaaattgaaaagatggtcaaccaagctgaagaatttaaagctgctgacgaggctttcgcaaagaagcacgaagccagacaaagattggaatcatatgtcgcctccatcgagcaaactgtcaccgacccagttctcagttctaagttgaagagaggttctaaatccaagattgaagctgctctgtcagatgctttggctgcattgcaaattgaagacccttctgctgatgaattgagaaaggccgaggtgggcttgaaaagggttgttaccaaggctatgtcttcccgttaa

SEQ ID NO: 5082 - DNA, 1302 bp, Artificial Sequence
  Optimized genes for Saccharomyces cerevisiae
atggttaacgttgttttgggttctcaatggggtgacgaaggtaaaggtaaattagttgatttactagtgggtaagtacgacattgttgctagatgcgccggtggtaacaacgctggtcacactatcgttgtcgatggtgtcaagtacgatttccacatgttacccagtggtttggtgaatccaaactgtcaaaacttgttgggtaatggcgtggtcattcacgtcccatctttcttcaaggaattggaaaccttggaagccaagggtttgaagaatgctcgttctagattgttcgtttcttccagagctcatttggtcttcgatttccatcaagttactgacaagttgagagagcttgagttgtctggtagatccaaggacggtaagaacatcggtaccactggtaagggtattggtcctacatattcaacaaaggcttcccgttcaggtttaagagtccatcaccttgtcaacgaccaaccaggtgcttgggaagaatttgtcgcaagatataaaaggttactagaaactagaagacaaagatacggtgattttgaatatgacttcgaagctaaactggcagagtacaagaaattgcgtgaacaattgaagccatttgtagttgactctgtcgttttcatgcacaacgctattgaagctaagaagaagatcttggttgaaggtgccaatgccttgatgctggacatcgattttggtacttacccatacgttacgtcgagcaacaccggtatcggtggtgtcttgaccgggcttggaattccaccaagaactattgatgaaatctacggagttgtcaaagcttacactaccagagttggtgaaggcccattcccaactgaacagttaaacgaaaatggtgaaaagttgcaaaccattggtgctgaattcggtgttaccacagggagaaagagacgttgtggttggttggatctagttgtactcaagtattctactttgatcaacggttacacctctttgaacattactaaattagatgttttagacactttcaaggaaattcctgtcggtatttcctactctatccaaggtaagaagttggacttgtttcctgaagacttgaatatcttaggtaaggtcgaggtggaatacaaggttctacctggctgggatcaagatatcactaagattaccaagtacgaagatttgccagaaaacgccaagaaatatttgaaatacattgaggactttgttggtgttccagtcgaatgggttggcactggtccagctagagaatccatgttgcataaagaaataaaataa

SEQ ID NO: 5083 - DNA, 561 bp, Artificial Sequence
  Optimized genes for Saccharomyces cerevisiae
atgggtattgaccacacttccaaacaacataagagatctggtcacagaactgctcctaaatctgacaatgtttatttaaagttgttggtcaagctatacactttcttggccagaagaaccgatgctccattcaacaaggttgttttgaaagctttatttctttcaaagatcaacagaccaccagtcagtgtgtctagaattgctagagctttgaagcaagaaggtgctgctaataaaacagttgtcgtagttggtactgtcaccgacgatgcccgtatctttgagttcccaaagaccactgttgctgccctgagattcactgccggtgcaagggccaagattgttaaggctggtggtgaatgtatcactttggatcaattggctgtcagagccccaaagggtcaaaacaccttgattttgagaggtccaagaaactccagagaagctgttagacatttcggtatgggccctcacaagggtaaggctccaagaatcttatccaccggtagaaagtttgaaagagcacgtggaaggcgtcgttctaaaggtttcaaggtctaa

SEQ ID NO: 5084 - DNA, 435 bp, Artificial Sequence
  Optimized genes for Saccharomyces cerevisiae
atggctggtgtgagtgtccgtgatgttgctgctcaagacttcatcaatgcttacgcctcatttttacagagacaaggtaagttggaggttccaggttacgttgatattgtcaagacttcttccggtaacgaaatgccacctcaagatgctgaaggttggttctataagagagctgcatccgtagcccgtcatatctacatgagaaagcaagttggtgtcggtaaattgaacaagctatatggcggagccaaatccagaggtgttagaccatacaagcacattgacgcttctggttctatcaacagaaaagtcttgcaagctttggaaaagattggtattgttgaaatttctccaaagggtggtagaagaatctctgaaaacggtcaaagagacttggacagaattgctgcccaaaccttagaagaagatgaataa

SEQ ID NO: 5085 - DNA, 894 bp, Artificial Sequence
  Optimized genes for Saccharomyces cerevisiae
atgtctggtccacctcctccatacgaagaacagagcagtcatttgtacggtcaaccagcctcctctcaagatggtaacgctttcattccagaagacttcaagtactctactgttgttatttcttgtgaaccaattatcagacaaagattcatgcacaaggtctattccctactctcctgccaattattagcatcgctttctttctgttactgggcttctgtctctacctctttgcaaaactttatcatgtcccacattgctttgttttacatctgtatggtcgtgagtctggtatcatgtatctggttagctgtttctccaagacctgaagattatgaagcatctgttccagaaccattgttgaccggttcttctgaggagccagctcaagaacaacgtcgtttgccatggtacgttctgtcgtcttacaagcaaaaactaactctactttccattttcactttgagcgaagcttactgtttgagtttggttaccttggcttatgacaaagataccgtcttgtccgcccttttgataacaacaattgtcgttgtcggtgtctccttgactgctttgtcagaaagatttgaaaacgttttgaattctgctacctccatctactactggttgaactggggtttatggattatgattggtatgggtttgacggctttattattcggatggaacactcattcttccaagttcaacttgttatatggttggttaggcgccattctgtttactgcctacttgttcatcgacactcaattgatcttcagaaaggtttacccagatgaagaagttagatgtgctatgatgttgtatttggacatcgtgaatctatttttgtcaatcttgagaattttggccaactccaatgatgacaactaa

SEQ ID NO: 5086 - DNA, 1146 bp, Artificial Sequence
  Optimized genes for Saccharomyces cerevisiae
atgaaggaaaatgaattgaagaacgaaaaatcagtcgatgttttgtcattcaaacagttggaatctcaaaagatcgtcttgcctcaagacttgttccgtagttccttcacctggttctgctacgaaatttacaagtccttggctttcaggatctggatgctgttatggttaccattgtcggtatggtggaagctaagcaacaactgtatctacccattaattgtttctttgttggttttatttctaggtccaatttttgttcttgtcatctgtggtttgtccagaaagagatctttatccaagcaattgattcaattctgtaaggaagtgactgaaaacactccaagttccgacccacatgactgggaagtcgttgctgctaacttgaattcttacttgtacgagaacaaggcttggaacaccaagtacttctttttcaatgctatggtttgtcaagaagcttttagaactactctattagaacctttctctctcaaaaaggacgaagccgccaaggttaagtctttcaaggattctgtgccttacattgaagaagctttgggtgtttatttcagagaagttgaaaagcaatggaaattattcaactccgagaaatcttggtctccagttggcttggaagatgctaagttgccaaaggaggcctatcgttttaaattgacttggtttttgaaaagaatctccaacattttcatgttgatcccattcttgaacttcttgtgttgtatatatgtctctagaggtatgtgtttgttattgagaacattttacttaggatggattttgtttatgttggtccaaggtttccaaaacatgagaatgattgtattatctgttaaaatggaacacaagatgcaatttctgagtaccattatcaacgaacaagagtctggtgctaatggttgggatgaaatcgccaagaagatgaacagatatttgtttgaaaagaaggtctggaagaatgaggaattcttcttcgatggtattgactgtgaatggttcttttctcacttcttctacagagttcttagcgcaaagaaatccatgcgtgccttgtctttgaacgtcgaactatggccatacatcaaggaagcacagctttcatgctctgaagaatccctagcttaa

SEQ ID NO: 5087 - DNA, 1440 bp, Artificial Sequence
  Optimized genes for Saccharomyces cerevisiae
atgtctgccatcttgtccactacctcaaagagcttcttgtctcgcggcagcaccagacaatgtcaaaacatgcaaaaggctttgtttgcactgttaaacgctagacactactccagtgcttctgagcaaaccttgaaagagagattcgctgaaatcattccagctaaggccgaggaaattaagaaattcaaaaaggaacatggaaaaaccgttatcggtgaagttttgttggaacaagcttatggaggtatgcgtggtatcaagggtttggtttgggaaggttccgttttggaccctgaagaagggatcagatttagaggtagaactattcctgagattcagagggaactaccaaaggcagaaggctcaaccgaaccattgccagaagcccttttctggttattgttaactggtgaaatacccacagatgcccaagtcaaggctctatccgctgatttagctgctcgttccgaaatcccagaacacgtcattcaattattggattctttgcctaaggatttgcatccaatggctcaattctccattgctgtcactgccttggaatctgaatccaagttcgccaaggcttacgctcaaggtgtttccaagaaggaatactggtcttacacctttgaagactctctggatttgttgggtaaattgccagttattgcctcaaaaatctacagaaatgtctttaaagatggtaagattacgagtaccgatccaaatgctgactacggtaagaacttggctcagctattaggttacgaaaacaaggacttcatcgacttgatgagattgtacttgaccatccattctgaccacgaaggtggtaacgtttctgctcacactactcatttggtcggttctgcactttcttctccatatctatcgttggccgctggcttgaacggtctagccggtccattacatggtcgtgctaaccaagaagttctagaatggttgttcaagttgcgtgaagaagtcaaaggtgactattccaaagaaactatcgaaaagtacttatgggatactttgaatgctggtagagttgttccaggttatggtcacgcggtgttgagaaagactgacccaagatacactgctcaaagagaatttgctttgaagcatttcccagattatgaattgtttaaattagtctctaccatttatgaggtggcacctggtgtcctgacaaagcacggtaagaccaagaatccatggccaaacgtcgattcccactctggtgtacttttgcaatactacggtttgactgaagcttcattctacacagtactcttcggtgttgccagagccattggtgtcttacctcaattgattattgacagagctgttggtgctccaattgaaagaccaaagtctttctctactgaaaaatacaaggaattagttaagaagatcgagagtaagaactaa

SEQ ID NO: 5088 - DNA, 6702 bp, Artificial Sequence
  Optimized genes for Saccharomyces cerevisiae
atgtctgaagaatcactttttgaatcttctccacaaaagatggaatatgaaatcaccaactactccgaaagacacacagagctaccaggtcacttcatcggtttaaacactgtcgacaaattggaagaatccccattaagagattttgtgaagtcccacggtggtcacaccgttatctccaagatcttaattgccaacaacggtattgctgccgttaaggagattcgttctgttagaaaatgggcttacgaaacctttggtgatgatcgtactgttcaatttgttgccatggctaccccagaagatttggaagccaacgctgaatacattagaatggctgatcaatacatcgaagtcccaggtggtactaataacaacaactacgccaacgttgatttgattgttgatattgcagaaagagctgatgtcgatgctgtctgggctggttggggtcacgcttcggagaacccattgttgccagaaaagttgtcccaatccaagagaaaggtcattttcatcggtccaccaggtaacgctatgagaagcctaggtgataagatttcgagtaccatcgtcgctcaatctgctaaggttccatgtatcccatggtccggaactggtgtcgacaccgtccacgttgacgaaaagaccggtctagtctccgtcgatgatgacatctaccaaaaaggttgctgcacctctcctgaagacggtttgcaaaaggctaagagaatcggttttccagtcatgatcaaggcaagtgaaggtggtggtggtaagggtatcagacaagtcgagagagaagaagattttatcgctttataccatcaagccgctaacgaaattccaggctctccaatttttattatgaaactagcgggtagagctcgtcatctcgaagttcaattattagccgaccaatacggtaccaacatttctttattcggtagagactgttctgtccagagaaggcatcagaaaatcatcgaagaagctccagttacaattgccaaggccgaaaccttccatgaaatggagaaggctgctgtcagattagggaaattggttggttacgtttctgccggtactgtagaatacctatattcgcatgatgatggtaaattctacttcttagaattgaacccccgtctacaagtcgaacatcctaccactgaaatggtttctggtgttaacttgcctgccgctcaattgcagatagctatgggtattccaatgcacagaatctccgatattagaactttgtacggtatgaacccacattccgcctctgaaatcgactttgaattcaagacccaagacgctactaagaaacaaagaagacctattccaaagggccattgtactgcttgtagaattaccagcgaagacccaaacgatggtttcaaaccatctggcggaaccttgcacgaattgaactttagatcttctagcaacgtctggggttacttttcagttggaaataatggtaacatccactcttttagtgacagtcaatttggtcatatttttgctttcggtgaaaacagacaagcttcccgtaagcacatggttgtggccttgaaagaattgtctattagaggcgacttccgtaccaccgtggaatacttgatcaagttgttggaaacggaagatttcgaggacaacaccattactaccggctggttagatgatcttattactcacaagatgaccgctgaaaagcctgatccaacattagcagttatctgtggtgctgctacaaaggcttttttagcttctgaagaagctagacataagtacattgaatctttgcaaaagggtcaagttttatctaaggatctgttacaaaccatgttcccagtcgatttcattcatgaaggtaagcgttacaagttcactgtagcgaaatctggtaatgataggtataccttatttattaacggttcgaagtgtgatatcatcttgagacaactgtcggatggtggtttgttgatcgccattgggggtaagtctcacactatttactggaaggaagaagtcgcagctacccgtttgagcgtagactctatgactactctactggaagttgaaaacgatccaactcaattgaggacaccatcccccggtaaattggtaaagttcttggtggaaaacggagagcacattatcaaaggccagccgtatgctgaaattgaagttatgaagatgcaaatgccattggtttctcaagaaaacggtattgtccaattattgaaacagcctggttctaccattgttgctggtgacattatggccatcatgactttggatgacccttccaaggtcaaacatgctttgccattcgaaggtatgttgccagacttcggttctccagttattgaaggtacaaaacccgcctacaagttcaagtcccttgtttcaacattagaaaacatattgaagggttacgacaaccaagtgatcatgaatgcatccttacagcagttgattgaggtattgagaaacccaaagttaccatactctgaatggaagttgcatatctctgcattgcactccagattacctgctaagctggatgaacagatggaagagttagtcgccagatcactacgcagaggtgctgttttcccagcccgtcaactttctaagctcattgacatggctgtcaagaacccagaatacaacccagacaagcttttgggtgccgtcgttgaaccactagccgatatcgctcacaagtattccaatggtttggaagcacacgaacactcaattttcgtccatttcttggaggaatattacgaagttgaaaaactgtttaatggcccaaatgtcagagaagaaaacattattcttaaattgagagacgaaaatccaaaggatttggacaaagttgcactaactgtcttgtcccattctaaggtttccgctaaaaacaacttgattctggccatcttgaagcattaccaaccattgtgtaagttgtcctccaaggtatcagctatcttttccactcctttgcaacacattgttgagctcgaaagtaaggctacggctaaggttgctctacaggcaagggaaattttgatccaaggtgctttgccctctgtcaaggaaagaacagaacaaattgaacacattttgaagtcatccgttgttaaggtcgcctatggttcttctaatccaaaaagatccgagcccgatttgaacatcttgaaagacttgattgattctaactatgttgtcttcgatgttttgcttcagtttttgactcatcaggacccggtcgtcactgctgctgctgctcaagtttatatcagaagagcttatagagcttacactattggtgacattcgtgttcacgagggtgtgactgttccaatcgtagagtggaaattccaattgccatctgctgcattttctactttcccaactgttaagtctaaaatgggtatgaacagagctgtaagtgtctctgacctatcgtatgtggctaactcccaatcttcccctttaagagaaggtatcttgatggctgttgaccatttggacgatgtcgacgagatcttgtctcaatccttggaagttatcccaagacaccaatcatcttcaaacggtccagccccagatagatctggttccagcgcgtctttgtctaacgttgctaatgtttgtgttgcatctaccgagggattcgaaagcgaggaagaaattttagttcgtttacgtgaaatcctagatttgaacaagcaagaattgattaatgcttctatcagaagaatcactttcatgtttggtttcaaggacggttcttaccctaaatactacacatttaacggtccaaactacaacgagaatgaaactatcagacacatcgaaccagctctggccttccaattggaactgggtcgtttatcaaatttcaatatcaagccaatctttaccgacaatagaaatattcacgtctatgaagctgtttccaaaacttctccattggacaagagattcttcaccagaggtatcatcagaactggccacatacgtgatgacatttccattcaagaatacttaaccagtgaggctaatcgattgatgtccgacatattagataatttggaagttaccgatactagtaatagtgatttaaaccacatcttcatcaacttcattgctgtgtttgacatttcaccagaagatgtggaggccgctttcggcggttttcttgaaagatttggtaagagattgctaagattgagagtttcgtctgctgaaatccgtatcattatcaaagatcctcaaactggtgctcctgttccacttagggctttgatcaacaatgtatccggttatgtcattaaaaccgaaatgtacactgaggtgaagaatgccaagggtgaatgggttttcaaatccttgggtaagccaggttccatgcacttgagaccaattgctactccatatccagtcaaggaatggttgcaaccaaagagatacaaagctcatttaatgggtaccacttacgtctacgatttccctgagttgttcagacaagctagcagcagccaatggaagaacttctccgctgacgttaaattaactgacgacttcttcatttctaacgaattaatagaagatgaaaacggcgaattgaccgaagtcgaacgtgaacctggcgctaatgctattggtatggttgcctttaagatcacagtcaagaccccagaatacccaagaggtaggcaattcgttgttgtcgcaaatgacatcactttcaagattggttcattcggtcctcaagaggatgaatttttcaacaaagttactgaatacgctagaaagaggggcattcctcgtatttatctggcggctaactccggtgctagaattggcatggccgaagaaattgtaccattgtttcaagtcgcttggaacgacgccgccaatcctgacaaaggtttccaatatttatatttgacttccgaaggtatggaaactttgaagaagtttgataaagaaaattctgttttgacggagcgtacagttattaacggtgaagaacgttttgtcatcaagactatcattggatctgaagacggactcggtgttgaatgtttgcgtggttctggactgattgctggtgccacttctagggcttaccacgacatcttcacaataactttggtcacctgcagatccgttggtattggtgcatacttggtccgtttgggccaaagagccattcaagttgaaggacaaccaattattttgactggtgctccagctatcaacaagatgttgggtagagaagtttacacctccaacttacaattaggtggtactcaaatcatgtataacaacggtgtctctcatttgaccgcggttgatgacttggccggtgttgaaaaaattgtcgaatggatgtcatacgttcctgcaaagagaaacatgccagttccaattttggaaaccaaggacacttgggacagaccagtggatttcactccaactaacgacgaaacttatgatgttagatggatgattgaaggtagagaaaccgaatccgggtttgagtacggccttttcgacaaggggtctttctttgaaacgctgagtggttgggccaagggtgtagttgtcggtcgtgccagattaggtggtattcccttgggtgtcattggtgttgaaactagaaccgtcgaaaatcttattccagcagacccagctaaccctaacagtgctgaaacactcatccaagagccaggtcaagtttggcatccaaactctgctttcaagactgcccaagctatcaacgatttcaacaatggtgaacaattgccaatgatgattttggccaactggagaggtttctctggtggtcaaagagatatgttcaacgaagtcctaaaatatggttccttcatcgttgatgctttggttgactacaagcaacctatcataatatacatccctccaaccggtgaattgagaggtgggtcttgggttgttgttgacccaaccatcaatgctgaccaaatggaaatgtacgctgacgtcaacgctcgcgcaggtgtcttagaaccacaaggtatggtcggtatcaagttcagacgtgaaaagttgttagacactatgaacagattggatgacaagtacagagaattgagatctcaattgagtaacaagagcttggcaccagaggttcatcaacaaatctctaagcaattggctgatagagaaagagagttgttgccgatctacggtcaaatttctttgcaattcgctgacttacatgaccgttcctctagaatggtcgctaaaggtgttatttccaaggaactagaatggactgaagctagaagattctttttctggagattgagaagaagattgaatgaagagtacttgattaagagactatctcaccaagtgggtgaagcctccagattggaaaaaattgccagaattcggtcctggtacccagcttctgtggaccacgaagacgacagacaagttgccacctggattgaagaaaactataagacattggatgataagttgaagggtttaaagctagaatctttcgcccaagatctagccaagaagatcagatctgatcacgataacgccatcgatggtttgtcagaagtgattaagatgctttcaactgatgacaaggaaaagctattgaagactttaaaataa

SEQ ID NO: 5089 - DNA, 765 bp, Artificial Sequence
  Optimized genes for Saccharomyces cerevisiae
atgtctggttacgatagagctttgtccatcttttctccagatggtcacattttccaagttgaatatgctcttgaggccgtaaagagaggtacttgcgccgttggtgttaagggtaagaactgtgtcgttttgggttgtgaaagaagatctactttgaagttgcaagatactagaatcacaccctcaaaggtttccaaaattgactctcatgtcgtcctgtcgttttcaggattgaatgctgattctcgtatcttgattgaaaaggctagagttgaagctcaatcccacagattgactttagaagatcctgtaacagtggaatacttgaccagatatgtcgcaggcgtccaacaaagatacactcaatctggtggtgttagaccattcggtgtctccacgctaattgctggtttcgacccaagagatgatgaaccaaagttataccaaactgaaccatccggtatctactcttcttggtctgcccagaccattggtagaaactccaagaccgtccgtgaattcttggaaaaaaactatgacagaaaggaacctccagctactgtcgaagaatgtgttaaattaaccgtgcgttctttgttggaagttgttcaaaccggtgctaagaatatagaaattactgttgtcaagccagacagtgacattgttgccttaagtagcgaggaaatcaaccaatacgttacccaaatcgaacaagaaaagcaagaacaacaggagcaagacaagaagaaaaaatccaaccattaa

SEQ ID NO: 5090 - DNA, 321 bp, Artificial Sequence
  Optimized genes for Saccharomyces cerevisiae
atgaagtacttggctgcgtatttactacttaatgctgccggcaacactcctgacgctaccaagatcaaggctattttggagtcagttggtatcgaaattgaagacgaaaaagtttcttccgtcttaagtgctttggaaggtaagtctgtcgatgaattgattactgaaggtaacgaaaaattggccgctgttccagccgccggtccagcttctgctggtggtgctgccgcagcttccggtgatgctgcagccgaagaggaaaaggaagaagaagctgctgaagaatctgacgatgacatgggtttcggtttgtttgattaa

SEQ ID NO: 5091 - DNA, 429 bp, Artificial Sequence
  Optimized genes for Saccharomyces cerevisiae
atgtctcaagctgtcaatgctaagaagagagttttcaagacccatagttacagaggtgttgacttggaaaagctactggagatgtccactgaagatttcgtcaaattggctcctgccagagtccgtaggagatttgctcgtggtatgacttccaagccagctggtttcatgaagaagttgagagctgccaagttagccgcacctgaaaacgaaaaaccagctccagttagaactcacatgagaaacatgattattgttccagaaatgatcggctctgtggttggtatctacaacggtaaggctttcaaccaagttgaaatcagaccagaaatgttgggtcattatttaggtgaattctctattacatacactccagtcagacacggtagagccggtgctaccacctcacgttttattccattgaaataa

SEQ ID NO: 5092 - DNA, 1263 bp, Artificial Sequence
  Optimized genes for Saccharomyces cerevisiae
atgtctaaaggtaaggtctgtttggcttactctggtggtctagacacttcagtgatattagcttggttattggaccaaggttacgaagttgttgctttcatggctaatgtcggtcaagaggaagatttcgacgctgccaaggaaaaagcacttaagattggtgcttgtaagtttgtttgtgtcgactgtagagaagacttcgttaaggacattttattcccagctgttcaagttaatgctgtctatgaggatgtctacttgttgggtacctctttggctagaccagttattgctaaggcccaaattgacgtagcgaagcaagaaggttgttttgccgtttcccacggttgcacaggcaaaggcaacgatcaaatcagattcgaattgtctttctacgctttgaagcctgacgtcaagtgtatcactccatggagaatgccagaattctttgaaagatttgctggacgaaaagatttactggattatgctgctcaaaagggtattccagtcgcacaaaccaaggcaaaaccatggtctaccgatgaaaaccaagctcatatttcctatgaagctggtatcttggaagacccagacaccactccaccaaaggatatgtggaagttgatcgttgatccaatggatgctccagatcagcctcaagatttgaccattgattttgagcgtggtttacctgtcaaattgacttacactgacaacaagacctcgaaagaagtgagtgttaccaagccattggatgttttcttagccgcttctaatttggccagagctaacggtgttggtagaatcgatattgttgaagatcgttacatcaacttgaaatccagaggttgctacgaacaagcccccctaacggtcctcagaaaggctcacgttgacttggagggtttgactttggacaaggaagtcagacaattgagagactcattcgtcaccccaaactatagtcgtttgatttacaacggttcttacttcactcctgaatgtgaatacattagatccatgattcaaccatctcaaaactccgtgaatggtactgtaagagttagattgtacaagggtaacgttatcatccttgggaggagcacaaaaactgaaaagctatatgaccctaccgaatcttctatggacgaattaactggtttcttgccaactgatactaccggttttattgccatccaggccattcgtatcaagaagtacggtgaatccaagaagactaagggtgaagaactgacattataa

SEQ ID NO: 5093 - DNA, 1047 bp, Artificial Sequence
  Optimized genes for Saccharomyces cerevisiae
atgtctatcccagaaactcaaaagggtgttatcttctacgaatctcacggtaaattggaatataaggatattccagttccaaagccaaaggcaaatgaattgttgattaacgttaagtactctggtgtctgccacactgatttgcacgcttggcatggtgattggccattgcctgtaaaactacctttggttggtggccacgaaggtgctggtgtggtcgttggtatgggtgaaaacgtcaagggttggaagattggtgactacgctggcataaaatggttgaacggttcctgtatggcttgtgaatactgtgagctgggtaacgaatccaactgtccacatgctgacctttcaggttacactcatgacggttctttccaacaatacgccaccgccgacgctgtccaagctgctcatattcctcaaggtactgacttggcacaggttgctccaatcttgtgtgctggtattactgtttacaaggctttaaaatctgctaacttgatggccggtcactgggttgccatctcaggggcggcaggtggtttaggttctttggctgttcaatatgccaaagctatgggttacagagttttgggtatcgatggcggagagggtaaggaagaattatttcgttccatcggtggtgaagtctttattgattttaccaaggaaaaggacattgttggcgcagtcttgaaggctactgatggtggtgctcacggtgttattaatgtttctgtttccgaagccgccattgaagcttccacacgttacgttagagccaatggtaccaccgtcttagtcggtatgccagctggtgccaagtgttgctctgatgttttcaaccaagttgtcaagagcattagtattgtcggatcttacgtcggtaacagagctgataccagagaagctttggacttcttcgctagaggtttggtgaagtcccccatcaaggttgttggactatcgacattaccagaaatctatgagaagatggaaaaaggtcaaatcgtgggtagatatgtagtcgacactagtaaataa

SEQ ID NO: 5094 - DNA, 342 bp, Artificial Sequence
  Optimized genes for Saccharomyces cerevisiae
atgtctgaaattcaaaacaaggctgaaaccgccgctcaagatgttcaacaaaagttggaagaaactaaggaatctttacagaataagggtcaagaagtcaaggaacaagccgaagcctcaattgacaatctaaagaacgaagcaactccagaagctgaacaagttaagaaagaggagcaaaacattgctgatggtgtcgaacaaaaaaagactgaagctgccaacaaggttgaagaaacaaagaagcaagcttctgctgctgtgtccgaaaagaaggagaccaaaaaagaaggtggtttcttgaagaaattgaacagaaagatcgcttccatctttaactaa

SEQ ID NO: 5095 - DNA, 561 bp, Artificial Sequence
  Optimized genes for Saccharomyces cerevisiae
atgggtattgaccacacatcaaagcaacacaagagatctggtcacagaaccgctccaaaatccgataatgtttacttgaagttgttggtcaagttatatactttcttggctagaagaactgatgctcctttcaacaaagttgtcttaaaggcactatttctgagtaaaatcaacagaccaccagtctctgtttctcgtattgccagagctttgaaacaagaaggtgccgccaacaagactgtcgtggtagttggtaccgtcaccgatgacgctagaatctttgaattcccaaagaccactgttgctgctttaagattcacagccggtgctcgtgctaagatcgttaaggctggtggtgaatgtatcaccttggaccaattggcagttagagctccaaagggtcaaaacactttgattttgagaggtccaagaaattccagagaagctgtcagacatttcggtatgggacctcataaaggtaaggccccaagaattctttctactggtagaaagtttgagagagcccgtggccgtcgtaggtccaagggtttcaaggtttaa

SEQ ID NO: 5096 - DNA, 429 bp, Artificial Sequence
  Optimized genes for Saccharomyces cerevisiae
atggctccatctgctaaggccaccgcagccaagaaggcagtggtcaagggcaccaacggtaagaaggctttgaaggtcagaactagtgctacctttagattgccaaagactttgaaacttgctagggccccaaaatatgcttccaaggctgtccctcactacaaccgtttggattcttacaaggttattgaacaaccaattacttctgagactgctatgaaaaaagttgaagatggtaacatcttggttttccaagtttccatgaaggccaacaagtaccaaatcaagaaggctgttaaggaattgtacgaagttgatgtcttaaaagtcaatacactagtaagaccaaatggtactaagaaagcttacgttagattaaccgctgactatgacgccttggacattgctaacagaattggttacatctaa

SEQ ID NO: 5097 - DNA, 321 bp, Artificial Sequence
  Optimized genes for Saccharomyces cerevisiae
atgtctactttgttgaagtctgctaaatccattgttccattgatggaccgtgtactagtccaaagaatcaaggctcaagctaagaccgcctcaggcttatacttgccagaaaagaacgttgaaaaattgaaccaagcagaggtggttgctgttggtccaggtttcactgatgccaacggtaacaaggttgtcccacaggtcaaggtcggtgaccaagttttgatccctcaatttggtggttccaccattaagttgggtaatgatgacgaagttatcttattcagagatgctgaaattttggctaaaattgccaaggattaa

SEQ ID NO: 5098 - DNA, 186 bp, Artificial Sequence
  Optimized genes for Saccharomyces cerevisiae
atggatggtatgtttgctatgccaggtgctgccgctggcgccgcatcacctcaacaaccaaaatccagattccaagctttcaaggaatctccactatacactattgctttgaacggtgccttctttgtcgccggtgttgctttcatccaatctccattgatggacatgttggctccacaattataa

SEQ ID NO: 5099 - DNA, 1164 bp, Artificial Sequence
  Optimized genes for Saccharomyces cerevisiae
atgtctcacagaaagtacgaagccccaagacacggtcacctaggctttttacctcgtaagagagctgcttctattagagcccgtgttaaagctttcccaaaggatgaccgttccaagccagttgccttgacttctttcttgggttataaagcaggtatgactaccattgttagagacttggatagaccaggctccaagttccataaaagagaagtcgttgaagctgtcactgttgttgacacaccacctgtggtggttgtcggagttgttggttatgtcgaaacccccagaggtctaagatccttaaccactgtctgggctgaacacttgtctgacgaagttaagcgtcgtttctacaagaactggtacaaatcaaagaagaaggccttcaccaagtactctgctaagtatgctcaagatggtgccggtattgaaagagagctggccagaatcaagaaatatgcatcggtagtaagagttttagttcacactcaaatcagaaaaacgccattggcccagaagaaggctcatttggctgaaatccaattgaatggtggttccataagtgaaaaggtcgactgggcccgcgaacattttgagaaaaccgtcgctgtggactctgtctttgaacaaaacgaaatgattgatgctattgctgttactaagggccatggtttcgaaggtgttacccacagatggggtaccaagaagttgccaagaaagactcatcgtggtttgagaaaggttgcttgtatcggtgcttggcatccagctcacgttatgtggtctgttgcaagggctggtcaaagaggttaccactctagaacaagtatcaaccacaagatctacagagtcggtaaaggtgatgatgaagctaacggtgctactagctttgacagaactaaaaagaccatcactccaatgggtgggtttgtccattacggtgaaattaagaatgatttcatcatggtcaagggttgtattccaggtaacagaaagagaattgtcacacttaggaagtctttgtacaccaacacttccagaaaggctttggaagaagtttccttgaaatggattgacaccgcctcaaaattcggtaagggtagattccaaactcctgcagagaagcacgctttcatgggtactttgaagaaagatttataa

SEQ ID NO: 5100 - DNA, 573 bp, Artificial Sequence
  Optimized genes for Saccharomyces cerevisiae
atgtctgctccacaggccaagatattatctcaagcccctaccgaactggagttacaagttgctcaagctttcgttgaattagaaaacagttctccagaattgaaggctgaattgagaccattgcaattcaagtccatcagagaaattgatgttgccggcggtaagaaggcccttgctatttttgttcctgtcccttcgttagctggtttccacaaggttcaaactaaactaaccagagagctagaaaagaaatttcaagataggcacgttatcttcttggctgaaagaagaatcttgccaaagccatcccgtacatcaagacaagtgcaaaaacgtccaagatctcgtactttgaccgcagtacatgacaagattttggaagatttggtcttcccaactgaaatcgtcggtaagagagttagatacttggttggtggtaacaagatccaaaaggtcttgttggactccaaggatgtccaacaaattgactacaagttggaatctttccaagctgtttataataaattgactggtaaacagattgtctttgaaattccatctgaaactcattaa

SEQ ID NO: 5101 - DNA, 381 bp, Artificial Sequence
  Optimized genes for Saccharomyces cerevisiae
atgtcttggcaagcttacaccgataacttgatcggtactggtaaggttgacaaggctgtcatctattcaagagctggtgacgccgtctgggctacttctggtggtctatctttgcaaccaaatgaaattggcgagattgttcaaggtttcgacaacccagctggattacaatccaacggtttacacattcaaggtcaaaagtttatgttgttgagagccgatgaccgttccatctacggtagacacgatgctgaaggtgttgtttgtgttagaaccaagcaaactgtcattattgcacattacccacctacagtgcaggccggtgaagctaccaaaatcgttgaacaattggctgattatttgattggtgtccaatactaa

SEQ ID NO: 5102 - DNA, 2529 bp, Artificial Sequence
  Optimized genes for Saccharomyces cerevisiae
atggttgcttttacggtggaccaaatgagatctttaatggacaaggtcaccaacgtcaggaatatgtccgtcatcgcccatgttgaccatggcaaatctaccctaactgattctttggtgcagagggccggtataatttccgctgccaaggctggtgaagctagattcactgacactagaaaggatgaacaggaaagaggtatcaccataaaatccacggcaatttctctgtattcagaaatgtctgacgaagatgttaaggaaatcaagcaaaagactgatggtaactctttcttgatcaacttgattgactccccaggtcacgttgacttctcgagcgaggttactgccgctttaagagttaccgacggtgctttggttgtcgtagacaccattgaaggtgtttgcgtgcaaaccgaaaccgtcttgcgtcaagcattgggtgaaagaattaagcctgttgttgttatcaataaagtcgacagagctctattggaacttcaagtctctaaggaagacttataccaaactttcgccagaactgtcgaaagtgtcaacgttattgtctcaacttacgctgatgaggtactgggtgacgttcaagtttacccagctcgtggtaccgttgccttcggttccggtttgcatggttgggcctttaccatcagacaatttgccaccagatatgctaaaaaatttggtgtcgacaaggctaagatgatggatagattatggggtgactcattctttaacccaaagaccaagaaatggactaacaaagataccgatgccgaaggtaagccattggaacgtgctttcaacatgttcattttggacccaattttcagactatttactgctattatgaacttcaagaaggatgaaattccagtcttgttggaaaaattagagattgttttaaagggtgatgaaaaggacttggagggtaaagctttgttaaaagtggtcatgagaaagtttttgccagctgctgacgcgctgctggaaatgatcgttcttcacttgcctagtccagttactgctcaagcttatagagctgaacaattgtacgaaggtcctgctgacgacgctaactgtattgctatcaagaattgtgatccaaaggccgatttgatgttgtacgtttcgaaaatggtcccaacatccgataaaggcagattctacgctttcggtagagtctttgctggcactgttaagtcaggtcaaaaggttagaattcaaggtccaaactatgtccctggtaagaaggacgatttgttcatcaaggctattcagcgtgttgtgttgatgatgggtagatttgttgaacctatcgatgactgtcctgccgggaatatcattggtttggtcggtattgatcaattcttgctaaaaaccggtactttgactacaagcgaaacagctcacaacatgaaggttatgaagttctccgtttcccccgttgttcaagtagctgttgaagtcaagaacgctaatgatcttccaaagctagtggaaggtctaaagagattgagtaagtccgacccatgtgttttgacctacatgtctgaatctggtgaacacattgtcgcggggactggtgaattacatttggaaatttgcttgcaagatttagaacatgaccacgctggtgttccattgaaaatctctccaccagtcgttgcttacagagaaactgtcgagtctgaatcttctcaaacagccttgtccaagtctccaaataagcacaacagaatctatttgaaggctgaaccaatcgacgaagaagttagccttgccatcgaaaacggtattattaatcctcgtgatgatttcaaagcaagggcacgcatcatggctgatgactacggttgggatgtaaccgatgctagaaagatttggtgtttcggtccagatggtaatggtccaaacttagtcattgaccaaactaaggcagtccaatacttacacgaaatcaaagactctgttgtcgctgctttccaatgggctactaaagagggacccatttttggtgaggaaatgcgttctgtcagagttaacatcttggatgtcactctacatgctgacgccattcacagaggtggtggtcaaatcatcccaaccatgagaagagccacttatgccggtttcttgttggccgaccctaagatccaagagccggtcttcttagttgagattcaatgtccagaacaagccgttggtggtatctactctgttttgaacaagaagcgtggccaagttgtctccgaagaacaaagaccaggtactccattattcaccgtgaaggcctacttgccagtaaacgaatcctttggatttacaggtgaattgagacaagctacaggaggccaggcattcccacaaatggttttcgatcattggtctactttaggttctgatcctttagatccaacttccaaggctggtgaaattgttttggctgcacgtaagagacacggtatgaaagaagaagttccaggctggcaagaatactacgataagttgtaa

SEQ ID NO: 5103 - DNA, 1110 bp, Artificial Sequence
  Optimized genes for Saccharomyces cerevisiae
atgttaagaaacactttcttcagaaatacatccagaagattcttggccactgttaagcaaccatcaattggtagatataccggtaagcctaacccttccactggtaagtacaccgtctcctttattgaaggtgacggtatcggcccagaaatttccaagagcgtcaagaagatcttctctgctgctaacgtgcctatcgaatgggaatcttgtgatgtttctccaatttttgtcaacggtttgaccactattccagacccagctgttcaatccatcaccaagaacttggtcgctttgaagggtccattagccaccccaatcggtaaaggtcacagatccttgaatctaacgttgagaaagaccttcggtcttttcgccaatgttcgtcctgccaagtctattgaaggtttcaagactacctatgaaaacgtggatctagtactgattagagaaaatacagagggtgaatactctggtattgagcatattgtttgcccaggtgttgtccagagtatcaagttgattaccagggatgcttctgaaagagtcatcagatacgcttttgaatatgctcgtgccataggacgtccaagagttatcgttgttcacaaatctactatccaaagattggctgatggtttatttgttaacgttgctaaggaattgtccaaagaatacccagacttgacattggaaaccgaattaattgacaactctgttttgaaagtggtcactaacccctcggcttacactgacgctgtatcagtttgtccaaatttgtacggtgatatcttgtctgatcttaattccggcttgagtgctggttctttgggtttgactccaagtgcaaacatcggacataaaatctctatctttgaggcggtccacggttccgctccagatattgccggtcaagacaaagccaacccaactgcactactgttatcaagcgtcatgatgttgaaccacatgggtttaaccaaccatgctgaccaaattcaaaacgccgttctctctaccattgcttccggtccggaaaacagaacaggcgatttggcaggtactgctactacttcttctttcactgaagctgtcattaagagattataa

SEQ ID NO: 5104 - DNA, 192 bp, Artificial Sequence
  Optimized genes for Saccharomyces cerevisiae
atggctaaggtccacggttctttagccagagctggtaaggttaagtctcaaacccctaaagttgaaaagactgaaaaaccaaagaagccaaagggccgtgcttacaagagattgttgtataccagaagattcgttaatgtcactttggtcaacggtaaaaggagaatgaacccaggtccatccgttcaataa

SEQ ID NO: 5105 - DNA, 1314 bp, Artificial Sequence
  Optimized genes for Saccharomyces cerevisiae
atgccaaagaaggtctggaagtcttccactccatctacttacgaacatatttcttctttgagaccaaaattcgtgtcgcgtgttgacaacgttctacaccaaagaaagtcattaactttctctaacgtcgttgttccagacaaaaaaaataatactttgacttcctctgttatctactctcagggcagtgatatctatgaaatcgattttgctgtcccattgcaagaagctgcgtctgagccagttaaggactatggtgacgctttcgaaggaattgaaaacacatctctatctccaaagttcgtctaccaaggtgaaactgtatccaagatggcttacttggacaagaccggtgagaccacattattatccatgtctaagaacggttctttagcctggttcaaggaaggtattaaagtacccattcacattgtccaagaattgatgggtccagctaccagctatgcttccatccattctcttaccagacctggtgatttgccagaaaaggatttctccttggctatatctgacttcggtatttccaacgataccgaaaccatcgtcaagtcccagtcgaatggcgatgaagaagactctatcttgaagatcattgacaacgccggtaagcctggcgagattttgagaaccgtccacgttccaggtaccaccgttactcacactgtcagattttttgataaccatatctttgcatcttgttccgacgacaatattttaagattctgggacactagaacttctgataaacctatctgggttttgggtgaaccaaagaacggtaaattgacaagctttgactgttctcaagttagtaacaacttgtttgttaccgggttttcaacaggtatcatcaagttatgggatgctagagccgctgaagccgcaaccactgacttgacctacagacaaaatggtgaagatcctattcaaaacgaaattgccaacttctaccatgctggtggtgactccgttgtcgatgttcaattcagtgctacttcaagcagtgaattcttcactgttggtggtactggtaacatttatcactggaacaccgactactccctgtcaaagtacaacccagatgacaccattgctccaccacaagatgccacggaggaatcccaaactaaatctctcaggttcttgcacaagggtggttcccgtcgttctcctaagcaaattggtagaagaaacactgctgcttggcatccagtcatcgaaaatttggtcggtacagtggatgatgattctctggtttccatttacaagccatacactgaagaatctgaataa

SEQ ID NO: 5106 - DNA, 324 bp, Artificial Sequence
  Optimized genes for Saccharomyces cerevisiae
atggctgaatctcacagattatatgtcaagggtaagcatttgtcttaccaaagatccaagagagttaacaatcctaatgtgtctttgatcaagattgaaggtgtcgccactccacaagaagctcaattctacttgggtaaacgtattgcttacgtttacagagcctcaaaggaagttcgtggttccaaaatcagagtcatgtggggtaaggttaccagaactcacggtaactctggtgttgttagagctactttcagaaacaacttgccagctaagaccttcggcgcaagtgtcaggatctttctatatccatccaacatttaa

SEQ ID NO: 5107 - DNA, 633 bp, Artificial Sequence
  Optimized genes for Saccharomyces cerevisiae
atgttgcaatccgttgttttctttgctttgttgactttcgcctcctccgtctccgccatttattcaaataacaccgtatcaacaaccaccactttggctccttcctactctttggttcctcaagaaactaccatctcttacgctgatgacactaccacattttttgttaccagtactgtctactccacttcctggttcacttctacctctgccaccattacgaatgctgcttcctcttccctttcgacatcatctgcttctggttctgtgactccagaatctactcatgagattactagtaccagcactatcactagtaccctgctattaactttgcacgactctacaactttatctccatcttctactgccgcatctgtttctgatgaagattctaacaacaaggacgctaaggtcaaatctttcgaacaagctagcacctccaacggttgtgttccaattaccaagttcgtgacggtcactaacgaaccagttactcaatacgttactgttaccccaaatactaccacccagtatgtcaccgtcactggtgctccatctgtcacaaccacttcaccaggtaacgttcaatggtacaacactacttccatcaccaactccacatcttggtaa

SEQ ID NO: 5108 - DNA, 2523 bp, Artificial Sequence
  Optimized genes for Saccharomyces cerevisiae
atggctgaaaaggaagaagccatttttagatccgcagaaatggctttggtccaattctatattccacaagaaatttctcgtgattctgcttacactttaggtcaattgggtttggtacagttcagagacctaaactctaaggtcagagctttccaaagaacttttgtcaacgaaatcagaagattggacaacgtcgaaagacaatacagatatttctactctttgctgaagaagcatgatatcaaactgtatgaaggtgatacggacaagtacttagacggttccggtgaattatacgtcccaccttcaggctccgttattgatgattatgttagaaacgccagctatttggaagaacgtttaatccaaatggaggatgcaaccgaccaaattgaagttcaaaagaacgatttggaacaatataggtttattttgcaatctggtgacgaatttttcttgaagggggataacactgactccacttcttacatggatgaagacatgatcgatgctaacggtgaaaatatcgctgctgcaattggtgctagtgtgaactacgttactggtgttatcgcgcgtgacaaagtggccactttggaacaaatcctatggagagttttaagaggtaatttattcttcaagactgttgagattgaacagcctgtctacgacgttaaaaccagagaatataagcacaagaatgctttcattgttttttctcatggtgatttaataatcaagcgtattagaaagatcgccgagtccttggatgctaatttgtacgatgttgactcttctaacgaaggccgctctcaacaactagccaaggttaacaagaacttgtctgacttgtacaccgttttgaagaccactagtacgacacttgaatctgaactatatgctatagctaaggaattggactcctggtttcaagatgtcacccgtgaaaaagctattttcgaaatcttgaacaaatccaactatgacactaacagaaagattcttattgctgaaggttggattccaagagatgagttggctactctacaagctcgtttgggtgaaatgattgccagactaggaattgatgtaccttctatcattcaggtacttgataccaatcacaccccaccaaccttccacagaaccaacaagttcactgctggtttccaatccatctgtgactgttacggtattgcccaatacagagaaattaatgccggtctaccaactattgtcactttcccattcatgtttgctatcatgttcggcgatatgggtcacggatttttgatgactttggctgccctcagtctagtcttgaatgaaaagaaaatcaacaagatgaagagaggcgagatatttgatatggccttcaccggtagatacattattttactgatgggtgtcttctctatgtacacagggttcctttacaacgacatcttctccaaaactatgaccattttcaagtctggctggaaatggccagatcattggaagaagggtgagtctattaccgctacctctgtgggtacctacccaattggtttggattgggcttggcatggtactgaaaacgctttgttgttttcaaattcctacaaaatgaaattgtcaattttgatgggtttcattcacatgacttactcgtactttttttcgttggccaaccatttgtacttcaacagtatgattgacatcatcggtaacttcatccctggtttactcttcatgcaaggtatcttcggttacttgagtgtttgcatcgtttacaagtgggctgtcgactgggttaaggatggtaagccagctccaggtttgttgaacatgttgatcaatatgttcttgtctccaggtactatcgacgatgaattgtatccacatcaagccaaagttcaagttttcttattgttgatggcattggtttgtatcccatggttattgcttgtcaagcccttgcatttcaaattcactcacaaaaagaagtcccacgaacctttgccatctaccgaagctgacgctagcagcgaggacttagaagctcaacaattaatttccgccatggacgctgatgacgctgaagaggaagaagtcggttctggttcacacggtgaagatttcggtgacattatgatccaccaagtcatccatacaatcgaattctgtttgaactgtgtttctcacactgcctcctatctgaggttatgggcgctatcgctggctcacgctcaattgtcctctgttttgtggaccatgaccatccagattgcttttggtttcagaggttttgttggtgtctttatgacagtggctttatttgcaatgtggttcgctttgacttgtgccgtcttggtcttaatggaaggtacatctgctatgttacattctttgagattgcactgggttgaatccatgtccaagtttttcgttggtgagggattaccatacgaaccatttgcctttgaatacaaggacatggaagttgctgttgcatctgcctctagctccgcttcatcataa

SEQ ID NO: 5109 - DNA, 420 bp, Artificial Sequence
  Optimized genes for Saccharomyces cerevisiae
atgtggaaggctgttatgaatgcttggaacggtaccgagtctcaatccaagaacgtctccaacatccaatcttattctttcgaagatatgaaacgtattgttggtaagcatgacccaaatgtggtcttggttgatgtcagagaaccatctgaatactccattgtccacattcctgccagcatcaacgttccatacagatcccaccctgatgctttcgcactagatccattggaatttgaaaagcaaatcggtatcccaaagccagactctgccaaggaattgattttctactgtgcctcaggcaaaagaggtggtgaagctcaaaaggttgcttcgtctcatggttactctaacactagtttatatccaggttccatgaacgactgggtttctcacggtggtgacaaattggatttataa

SEQ ID NO: 5110 - DNA, 318 bp, Artificial Sequence
  Optimized genes for Saccharomyces cerevisiae
atgttgatgccaaaggaagacagaaacaagattcaccaatacttattccaagagggcgtggtcgttgccaagaaggatttcaaccaagctaaacatgaagaaattgacaccaagaacttgtacgtcatcaaggctttgcaatctctaacatccaagggttacgttaaaactcaattttcttggcaatattattactacactttgactgaagaaggtgttgaatacttgagagaatatttgaacttaccagaacacattgttccaggtacttacatccaagaaagaaatcctacccagcgtccacaaagaagatactaa

SEQ ID NO: 5111 - DNA, 1236 bp, Artificial Sequence
  Optimized genes for Saccharomyces cerevisiae
atgtctagcgccgctactaaggccactttctgtatccagaatggcccatcttttgaaggtatttcctttggtgctaacaagagtgtcgctggtgaaactgtcttcaccacttcactggttggttacccagaatccatgactgatccttcttaccgtggacaaatcttggttttcactcaaccattgattggtaactacggtgtgcccagtggcgaagccagagatgaatacaacttattgaaatactttgagtctccacacattcacgttgtcggtatagtcgttgctgaatatgcttaccaatattcccactggactgctgttgaatctttggcacaatggtgtcaaagagagggggtggctgctatcactggtgttgacacaagggagcttgttcaatacttgagagaacaaggttcttctctaggtagaattactttggctgatcatgacccagttccatacgttaacccaatgaagaccaacttggtcgctcaagttaccaccaagaagcctttccatgtttctgctttgccaggtaaggctaaggctaatgtagcactgatcgattgtggtgtcaaggaaaacattattagatgccttgtcaaacgtggtgccaacgttacagtattcccatacgattacagaatccaagatgttgcttctgaattcgatggtattttcttgtccaacggtcctggtaatccagaattgtgccaagctaccatttcaaatgtcagagaactattgaacaaccctgtttacgactgtattccaatcttcggtatctgtttgggtcatcaattgttggctttagcgtcgggcgcctctactcacaagttgaagtatggtaacagagctcacaacatcccagctatggacttgactaccggtcaatgtcatattacctctcaaaaccacggttatgccgtcgatccagaaaccttaccaaaggaccaatggaagccatattttgtcaacttaaacgacaaatccaatgaaggtatgatccatttgcagagaccaattttctccacccaattccaccctgaagctaagggtggtccgttggacactgccattttgttcgacaagttctttgataatattgaaaagtaccagttacaatcccaagccaaatcttccatcagcttaaaggttacttactccacggacaagtcacgtctacaatctatcaacgtcacaaaattagcaaaagaaagagttttgttttaa

SEQ ID NO: 5112 - DNA, 702 bp, Artificial Sequence
  Optimized genes for Saccharomyces cerevisiae
atgtcttctgctattactgctttgactccaaaccaagttaacgacgaattgaataagatgcaagctttcatcagaaaagaagctgaagagaaagccaaggaaattcaattgaaagctgaccaagaatatgaaatcgaaaagactaatatcgttagaaacgaaaccaacaatattgacggtaacttcaagtccaagttaaagaaggctatgttgtctcaacaaatcaccaagagcacaattgctaacaaaatgagattgaaggtcttaagtgccagagaacaatctttggatggtatttttgaagaaactaaggaaaaattatctggtatcgccaacaacagagatgaatacaagccaattttgcagtcgctgattgtcgaagctttgttgaaattgctagaaccaaaggcaatagtcaaggccttagaaagagatgttgatttgattgaatccatgaaggacgatatcatgagggaatacggtgaaaaggctcaaagagctccattggaagaaattgttatttcaaatgactacttgaacaaggatcttgtgtccggtggtgttgttgtctccaatgcttctgacaagatcgagatcaacaacactttggaagaacgtctaaaactactttccgaggaagccttgcctgcaatccgtctggagttatatggcccatctaagaccagaaagttctttgattaa

SEQ ID NO: 5113 - DNA, 432 bp, Artificial Sequence
  Optimized genes for Saccharomyces cerevisiae
atgtctgatgttgaggaggttgtcgaagttcaagaagaaactgttgttgaacaaactgccgaagtcaccattgaagatgctttgaaggtcgtacttaggacagcattagttcacgatggtttagccagaggattgagagaatctaccaaggctctaactagaggtgaagctttactggttgttttggtcagttcagtcactgaagccaacatcatcaagttggtggaaggtttggctaatgacccagaaaacaaggttccattgatcaaagttgctgacgctaagcaattgggcgaatgggctggtttgggtaagattgacagagagggtaacgctcgtaaagtcgttggtgcctccgttgtcgtggtcaagaactggggtgctgaaaccgatgaattgtccatgattatggaacatttctctcaacaataa

SEQ ID NO: 5114 - DNA, 1365 bp, Artificial Sequence
  Optimized genes for Saccharomyces cerevisiae
atgtctgaaccagaattccaacaagcatatgaagaagttgtttcttctctagaagacagcactttgtttgaacaacacccagaatacagaaaggttttgcctatagtctccgttccagaacgtattattcaattcagagtcacctgggaaaatgacaagggtgagcaagaggttgctcaaggttatcgtgtgcagtacaattctgctaagggcccatacaaaggcggtttgagattccatccatctgttaacttgtctattttgaagttcttgggtttcgaacaaatttttaaaaattcattaactggtttagatatgggtggtggtaagggtggactctgcgtcgatttgaagggtagatctaacaacgagattagaagaatctgttacgctttcatgagagaattgtccagacatatcggtcaagacactgacgtcccagctggtgacattggtgttggtggtcgtgaaattggttacttgttcggtgcttacagatcctacaagaactcttgggaaggtgtcttgaccggtaagggtttgaactggggtggcagtttgatcagacctgaggcaacaggttacgggcttgtatattatacccaagctatgattgattacgccaccaacggtaaggaatcttttgagggcaagagagttactatctctggttccggtaacgttgctcaatatgctgctctaaaagtcattgaattaggtggtactgttgtcagccttagtgactctaaaggttgtatcatctcagaaactggtattacgtccgaacaagttgccgatatttcctctgccaaagtcaacttcaagtctttagaacaaatcgttaatgagtactccactttcagcgaaaacaaggtccaatacatcgccggtgccagaccatggactcacgttcaaaaggtggatatcgctttgccatgtgctactcaaaatgaagtctctggtgaagaagctaaggctttggttgcgcagggagtcaagtttattgctgaaggttcaaacatgggttctacacctgaagctattgctgtctttgaaaccgctcgttcaactgctaccggacccagtgaagccgtctggtacggtccaccaaaggccgctaacttagggggtgttgcagtgtcgggcttggaaatggctcaaaactcccaaagaatcacttggacctctgaaagagttgatcaagaattgaaaaggatcatgatcaactgtttcaacgaatgtattgactatgccaagaagtacaccaaggatggtaaagttttaccatccctggtaaaaggtgctaatattgcctccttcatcaaggtttccgatgccatgtttgaccaaggtgatgttttctaa

SEQ ID NO: 5115 - DNA, 1197 bp, Artificial Sequence
  Optimized genes for Saccharomyces cerevisiae
atgtctcaaaacgtttatattgtcagcaccgctcgtactccaattggttctttccaaggttccctatcgtcaaagactgctgtagagttgggtgctgtggcactcaagggcgccttagccaaggttccagaattggatgcttccaaggacttcgacgaaattattttcggtaatgtgctgtctgctaatttaggccaagctcccgccagacaagtcgctttagctgccggtttatccaaccatatcgtagcatccactgtcaacaaggtctgcgcgagtgctatgaaggctatcatcttaggtgctcaatctatcaagtgtggtaacgctgacgtcgttgttgctggtggctgtgaatccatgaccaacgccccatactacatgccagctgctagggcaggcgctaagtttggtcaaactgttttggtcgatggtgttgaaagagacggtttgaacgatgcctatgatggtttggccatgggtgtccacgctgaaaaatgtgctcgtgactgggatattacaagagaacaacaagacaactttgctattgaatcttaccaaaagtctcagaaatcccaaaaggaaggtaaatttgataatgaaatcgttccagtcactatcaagggtttcagaggtaagccagatactcaagttacaaaggatgaagaacctgctagattgcacgttgagaaattgagatctgccagaactgttttccaaaaagaaaacggtaccgttactgccgccaatgcttctcctattaacgacggtgccgcagctgttatcttggtttctgaaaaggtcttgaaggaaaagaacttgaaacctctagccattatcaaaggttggggtgaagccgctcaccaaccagctgatttcacctgggctccatctttggctgtcccaaaggcccttaagcatgctggtattgaagatatcaactctgttgactactttgaattcaacgaagctttctccgttgttggtcttgtgaataccaagattttgaagttggacccatcaaaagttaatgtttacggtggtgccgtcgcactaggtcatccattgggttgttctggtgctagagttgtcgtcaccttgttgtccatattacagcaagaaggtggtaagatcggtgttgctgcaatctgtaacggagggggaggtgctagtagcattgttattgagaaaatttaa

SEQ ID NO: 5116 - DNA, 474 bp, Artificial Sequence
  Optimized genes for Saccharomyces cerevisiae
atgccaatcgaccaagaaaaactggccaagctacaaaagctttcagctaacaacaaggtcggtggtaccagaagaaagttgaacaagaaagctggttcttctgccggcgctaataaagatgacaccaagttacaatctcaattggctaaattacatgccgtcacaattgacaatgtggcagaggccaactttttcaaggatgatggtaaggttatgcatttcaacaaagttggtgttcaagttgctgctcaacacaacacttccgttttctacggtttgcctcaagagaagaacttgcaagatttgttcccaggtatcatcagtcagttgggtccagaagctattcaagctttgtcccagttagcagcccaaatggaaaagcacgaagctaaggctccagctgatgctgaaaagaaggacgaagccattccagaattggtcgaaggtcaaacttttgacgctgacgtagaataa

SEQ ID NO: 5117 - DNA, 483 bp, Artificial Sequence
  Optimized genes for Saccharomyces cerevisiae
atgggtaaatcacatggttacagaagtaggaccagatacatgttccaaagagatttcagaaagcatggagccgtccacatgtctacttatctaaaaatctacaaggtcggtgatattgttgacattaaagccaacggttccattcaaaagggtatgccacacaagttctaccaaggtaagaccggtgttgtctacaacgttaccaagtcttctgtcggcgtaattatcaacaagatggttggtaacagatatttggaaaagagattgaacttacgtgtggagcatatcaagcactccaagtgtcgtcaagaatttttagaaagagttaaggctaatgctgctaagagagctgaagctaaagctcaaggtgtcgcagttcaattgaagcgtcagcctgcccaaccaagagaatctagaatcgtttccactgaaggtaatgttccacaaactttggctccagtcccatacgaaacatttatttaa

SEQ ID NO: 5118 - DNA, 711 bp, Artificial Sequence
  Optimized genes for Saccharomyces cerevisiae
atgaagttgaacatttcctacccagtcaatggttctcaaaagacttttgaaatcgatgacgaacacagaataagagttttctttgacaaacgtattggtcaagaggtggatggtgaagctgttggtgatgaattcaagggttacgtttttaagatttctggtggtaacgacaagcaaggtttcccaatgaaacaaggtgttttgttgccaacaagaatcaaattacttttaaccaagaacgtcagttgttacagaccaagaagagacggtgagcgtaagagaaagtccgtaagaggtgctattgtcggccctgacttggccgtcttggctttggtcattgttaagaagggcgaacaagaattggaaggtttaactgacaccactgttccaaagagattaggtccaaaaagagccaacaacatccgtaaattcttcggtttgtcaaaggaagatgatgtcagagatttcgtcatcagaagagaagttactaaaggagaaaagacctacactaaggctccaaagatccaaaggttggttacccctcaaagattgcaaagaaagagacatcagagggcactgaaggttagaaatgctcaagctcagcgtgaagccgctgctgaatatgctcaattgctagccaagagactatctgaaagaaaggccgaaaaagctgaaattagaaaacgtcgcgcatcctctttgaaggcttaa

SEQ ID NO: 5119 - DNA, 894 bp, Artificial Sequence
  Optimized genes for Saccharomyces cerevisiae
atggcttttcagaaggatgctaagagctcagcgtattcttccagattccaaaccccattcagaagacgtagagaaggtaagactgactactaccaaagaaagagattggttactcaacataaagccaaatacaacactccaaagtacagattagtcgtcagatttacaaataaggacattatatgtcaaatcatctcctcgaccattaccggtgatgttgttttggctgccgcttactctcatgagctaccccgttatggtattactcacggtttaaccaactgggctgcagcatatgctactggtctgttaatcgcaaggcgtacgttacaaaagttgggtttggatgaaacttacaagggtgtcgaagaagttgaaggtgaatacgaattaacagaggccgtggaagacggtccaagaccatttaaggttttcttggacatcggtttgcaaagaaccaccactggagccagagtctttggtgctttgaagggcgctagtgatggtggcctttacgtacctcattctgaaaacagattcccaggttgggattttgaaaccgaagaaattgacccagaattgttgagatcctacattttcggtggtcacgtttctcaatacatggaagagctcgccgatgacgacgaagaacgtttctccgaattgttcaaaggttacttggctgatgatattgatgccgactctttggaagatatctacacttctgctcacgaagctatcagagctgaccctgctttcaagccaactgaaaagaaattcaccaaggaacaatatgccgctgaatctaagaagtatagacaaactaaattgtccaaggaggaaagagccgctagagttgctgctaaaattgctgccctagctggtcaacaataa

SEQ ID NO: 5120 - DNA, 324 bp, Artificial Sequence
  Optimized genes for Saccharomyces cerevisiae
atggctgaatcccacagattatatgtcaagggtaaacatttgtcttaccaaagatctaaacgtgttaacaacccaaatgtttctttgatcaagattgaaggtgtcgcaacacctcaagatgctcaattttatctaggcaagagaattgcttacgtttacagagcttccaaggaagttagaggttctaagatcagagttatgtggggtaaggtcaccagaactcacggtaactccggtgttgtcagagccactttcagaaacaacttgccagctaagaccttcggtgccagtgtgcgtatcttcttgtacccatcaaatatttaa

SEQ ID NO: 5121 - DNA, 1218 bp, Artificial Sequence
  Optimized genes for Saccharomyces cerevisiae
atgttctctttgaaggctctgctaccattggctttgttattggtttctgccaaccaagttgctgcaaaagttcacaaggctaagatctacaagcacgaattgtctgatgaaatgaaggaagttactttcgaacaacatttggctcacttgggtcaaaagtatttgactcaatttgaaaaggctaacccagaagtcgttttctccagagaacatccattcttcactgaaggtggtcacgatgtccctttgaccaactacttgaacgctcaatactacactgacattacattaggtactccaccacaaaacttcaaggtcatcttagataccggttcctccaatttatgggttccatccaacgaatgtggttcactggcttgtttcttgcattctaaatatgaccatgaagcatcatcctcttacaaagccaatggtacagaattcgcgattcaatatggtactggtagtttggaaggttacatttctcaagatacgctttccattggagatctaaccatcccaaagcaagactttgctgaagccactagtgaaccaggtttaacctttgccttcggtaagttcgatggtatcttgggtttgggatacgacactatctctgttgacaaggtggtaccacctttctacaacgccatccaacaagatttgttggatgaaaaacgtttcgctttctatctaggggatacttctaaggacaccgaaaacggcggtgaagctacttttggtggtattgacgagagcaaattcaaaggtgacatcacttggttaccagtcagaagaaaagcttactgggaagttaagtttgagggcattggtttgggtgacgaatacgccgaattagaatcccacggtgctgctattgatacaggtaccagcttgattaccttgccatctggcctcgctgaaatgatcaatgcagaaatcggtgccaagaagggttggactggccagtacacattggactgtaacactagagacaacttgcctgacttgatcttcaactttaacggttacaattttaccattggtccatacgattacaccttagaggtctctggttcttgcatatctgctatcaccccaatggacttcccagagcccgtgggtcctcttgccattgttggtgatgcttttttgagaaagtactattcgatttatgatcttggtaacaatgctgtcggtctagctaaggccatttaa

SEQ ID NO: 5122 - DNA, 654 bp, Artificial Sequence
  Optimized genes for Saccharomyces cerevisiae
atgtctaagatcacttcttctcaagtcagagaacatgtcaaggaattgttgaaatattccaatgaaactaagaaaagaaacttcttggaaaccgtcgagttacaggtaggactgaagaactacgatcctcaaagagacaagagattcagcggcagtctaaagttgccaaactgtccaagaccaaatatgtctatctgtattttcggtgacgcctttgacgtcgacagagctaagtcatgtggtgttgatgctatgtcggtggatgacttgaagaaattgaacaagaataagaagttgatcaaaaaactatccaagaagtacaatgcttttattgcttctgaagttttgattaagcaagttccacgtcttttgggtccacaattgtcaaaggctggtaaattcccaactccagtttcccacaacgacgatttgtatggtaaggtcaccgatgtgcgtagtacaatcaagttccaattaaaaaaggttttatgcttagcagttgctgttggtaacgttgaaatggaagaagatgtcttggtcaaccaaattttgatgtccgttaacttttttgtttctttactaaaaaagaactggcaaaacgtcggttctttggttgttaagtcttccatgggtcctgccttcagattgtactaa

SEQ ID NO: 5123 - DNA, 1113 bp, Artificial Sequence
  Optimized genes for Saccharomyces cerevisiae
atggctgaagcttctatcgaaaagactcaaatcttgcaaaagtatctagaattggatcaaagaggtcgtatcattgctgaatacgtttggattgatggtaccggtaacttgagatccaagggcagaaccctaaagaagagaatcacttctattgaccaattgccagaatggaatttcgacggttcttcgacaaaccaagctccaggtcacgactctgatatctacttgaagccagtggcttactaccctgacccattcagaagaggtgacaatattgttgtattggctgcctgttacaacaacgatggtactccaaacaagttcaaccaccgtcatgaagccgccaagttatttgctgctcacaaggacgaagaaatctggttcggtttggaacaagaatatacactttttgatatgtacgatgatgtttatggttggccaaagggtggttacccagcacctcaaggtccatactattgcggtgtcggtgccggtaaggtctacgctagagatatgattgaggcacattacagagcttgtttgtatgcaggattagaaatttctggtatcaacgccgaagttatgccatctcaatgggaattccaagtcggaccatgtaccggcatagacatgggtgaccagttatggatggccagatacttcttgcacagagttgcggaggagtttggtatcaaaatttcattccatccaaaacccttgaaaggtgattggaacggtgctggttgtcacaccaacgtctctaccaaggaaatgagacaacctggtggtatgaagtacattgaacaggctattgaaaaactgtccaaaaggcatgctgaacacatcaagttgtacggttccgacaacgacatgcgtttgactggtagacatgagactgcttccatgaccgcctttagtagcggtgttgccaatcgtggctcctccatcagaattccaagatctgttgctaaggaaggttacggttatttcgaagacagaagaccagctagtaacattgatccttacttagtcactggtattatgtgtgaaactgtttgtggggctatcgataatgctgatatgactaaagaatttgaaagagaatcttcataa

SEQ ID NO: 5124 - DNA, 279 bp, Artificial Sequence
  Optimized genes for Saccharomyces cerevisiae
atggctaaaagaaccaagaaggttggtattactggtaagtacggtgtcagatatggctcttctttacgtagacaagttaagaaattggaaattcaacaacacgctagatacgactgttctttctgtggtaaaaagactgtcaagagaggtgccgctggtatctggacttgttcatgctgtaagaagaccgttgccggtggtgcttacactgtctccactgctgctgccgcaacagtgcgttccaccatcagaagattgagagaaatggttgaagcttaa

SEQ ID NO: 5125 - DNA, 1377 bp, Artificial Sequence
  Optimized genes for Saccharomyces cerevisiae
atgggtaaggagaaatctcatatcaacgttgttgttattggccatgttgattccggcaagagcacaactaccggtcatttaatctacaagtgtggtgggatcgacaagagaactatcgaaaaatttgaaaaggaagccgctgaactaggtaagggttctttcaagtatgcttgggttctagacaaattgaaggctgaaagagagcgtggtatcacaatcgatattgccttatggaagttcgaaaccccaaagtaccaagtcacggtaattgacgccccaggtcacagagacttcattaagaacatgattactggtacctctcaagctgattgtgctatcttgattattgctggtggtgttggtgaatttgaggctgggatttccaaggatggtcaaaccagagaacatgccctgttggctttcactttgggtgtacgtcaattaattgttgccgtcaacaagatggattcagtcaaatgggatgaatctaggttccaagaaatcgtcaaggaaacttctaacttcatcaagaaggtcggttacaacccaaagactgtaccattcgttccaatttcgggttggaacggtgacaatatgatcgaggccaccaccaacgcaccatggtacaagggctgggaaaaagaaactaaggccggtgtcgttaagggtaaaacccttttagaagcgatagatgctattgaacagccttccagaccaactgacaagcctttgagattgccattgcaagatgtttataagatcggtggtattggtactgtccccgtgggaagagtcgaaacaggagtcatcaagccaggtatggttgtcactttcgctccagctggtgttactactgaagttaagtccgtggaaatgcaccacgaacaattggaacaaggtgttcctggcgataatgtcggtttcaacgtcaagaatgtttccgtcaaggaaattagaagaggtaacgtttgcggtgatgcaaaaaatgacccacctaaaggttgtgccagttttaatgctaccgtgatcgttttgaaccatcctggtcaaatttctgctggttattctccagtcttggactgtcacactgctcacattgcttgtcgtttcgacgaattgttggagaagaacgacagacgttctggtaagaagttggaagaccacccaaaattcttgaaaagtggtgacgctgctttggttaaatttgtcccatccaaaccaatgtgtgttgaagcattttctgaatacccaccattaggtagatttgccgttagagatatgagacaaactgttgctgttggtgtcattaaatcagtggataagaccgaaaaggctgccaaggttaccaaggctgctcaaaaggcagctaagaaataa

SEQ ID NO: 5126 - DNA, 525 bp, Artificial Sequence
  Optimized genes for Saccharomyces cerevisiae
atgtctgccaaagctcaaaacccaatgagagatttgaagattgaaaaattagtgttgaacatctccgttggtgaatctggtgacagactgacaagggcatccaaggttttggaacaattgtccggtcaaactccagttcaatctaaggccagatacactgtcagaactttcggaatcagaagaaacgaaaagatcgccgtccacgtcaccgtacgtggtccaaaggctgaagaaattcttgaaagaggtttgaaagttaaggaataccagctacgtgaccgtaattttagtgctactggtaacttcggtttcggtattgatgaacatattgacttgggtatcaagtacgatcctagcattggtatctttggtatggacttctacgttgttatgaacagaccaggtgctagagttaccagaagaaagagatgtaagggtactgttggcaattcacacaagaccactaaagaggataccgtctcttggttcaagcaaaagtatgatgctgatgtcttagacaaataa

SEQ ID NO: 5127 - DNA, 864 bp, Artificial Sequence
  Optimized genes for Saccharomyces cerevisiae
atgcaagctattgctgactctttttcagtaccaaacagattagtcaaagagctacagtatgacaacgaacaaaacttggaatccgattttgtcactggtgcttcccagttccaaagactagctccatctttgaccgttcctccaattgcgtctccacaacaatttttgagggcacacactgatgattctagaaacccagattgcaagatcaagattgcccacggcacaacaactttggctttcagattccaaggtggtattatcgtcgctgtcgactccagagctactgccggaaactgggttgcctcccaaactgttaagaaggtcattgaaattaatcctttcttgcttgggacgatggctggtggcgcagccgactgtcaattctgggaaacctggttaggttctcaatgtcgtctacatgagttgagagaaaaggaaagaatctccgtggccgccgcttcaaaaattttgagcaatttagtgtaccaatacaagggtgccggtttgtccatgggtaccatgatctgtggttacactagaaaggaaggtccaaccatttactacgttgactctgatggtacccgtttgaagggtgatattttctgtgttggttccggtcaaacctttgcttacggtgttttggatagtaattataaatgggacctgtctgttgaagatgctttgtacttgggtaagagatctatcttagctgctgctcacagagacgcttattctggtggttcggtcaacttatatcatgttactgaagacggttggatctaccacggtaaccatgatgtcggtgaattgttctggaaggttaaagaagaagaaggctctttcaacaacgttatcggttaa

SEQ ID NO: 5128 - DNA, 438 bp, Artificial Sequence
  Optimized genes for Saccharomyces cerevisiae
atgggtaagggaaaacctcgtggtttgaattctgccagaaagttgagagtccacagaagaaacaacagatgggctgaaaacaactacaagaagagattgttgggtactgctttcaaatcatctccatttggtggttccagccatgctaagggtatcgttttggaaaaattaggtattgaatccaagcaaccaaatagtgccattaggaagtgtgtcagagttcaattgatcaagaacggtaagaaggtcaccgcctttgttccaaacgatggttgtttgaacttcgttgacgaaaatgatgaagttttattggctggtttcggtcgtaaaggcaaggctaaaggtgacattccaggtgttagattcaaggttgtcaaggtgtctggtgtctctcttctagcattatggaaggaaaagaaagagaagccaagatcctaa

SEQ ID NO: 5129 - DNA, 522 bp, Artificial Sequence
  Optimized genes for Saccharomyces cerevisiae
atgttggctttggctgacaacattttgagaatcatcaacttcttgtttctggtcatctctattggtttgatttcctccttgttgaacactcaacacagacatagcagtcgtgttaactactgtatgttcgcttgtgcttacggtatcttcaccgattctttgtatggtgtctttgccaatttcattgaacctctagcttggccattggttttattcacactagattttttaaattttgttttcactttcactgctggtactgtcttagcagttggtattagagctcactcttgtaacaactcttcttacgttgactccaacaagatcacccaaggttctggcaccagatgtagacaggcacaagctgctgttgctttcttatacttttcatgcgccattttccttgccaaaactttgatgtctgtcttcaacatgatctcgaatggtgcctttggatcaggttccttctccaagagaagacgtactggtcaagtcggtgttccaaccatttctcaagtgtaa

SEQ ID NO: 5130 - DNA, 630 bp, Artificial Sequence
  Optimized genes for Saccharomyces cerevisiae
atgtctcaacaagttggtaactccatcagaagaaagcttgtcatcgtcggtgacggtgcttgtggtaaaacatgtttgttgattgtcttttccaagggacaattcccagaagtctacgttccaactgtttttgaaaactacgtcgccgatgttgaagttgatggtcgtagggtggagttggcattatgggacactgctggtcaagaagactacgatagattgagaccattgtcttatccagattcaaatgtcgttttgatctgtttcagcatagacttacctgactccttggaaaatgttcaagaaaaatggattgctgaagtgctacacttctgccaaggtgtcccaattatcttggttggttgtaaagtcgatttgagaaacgatcctcaaactattgaacaattgcgtcaggaaggtcaacaaccagttacaagtcaggagggccaatctgttgctgaccaaattggtgccaccggttactatgaatgttccgccaagactggttacggtgttagagaagttttcgaagctgctaccagagcttctttgatgggtaagtctaagaccaacggtaaggctaagaagaacaccactgaaaagaaaaaaaagaagtgtgtactattataa

SEQ ID NO: 5131 - DNA, 3099 bp, Artificial Sequence
  Optimized genes for Saccharomyces cerevisiae
atggccgacactccttctgttgctgttcaagccccaccaggttatggtaagaccgagcttttccatttgcctttgattgccttggcttctaaaggtgacgtcaagtatgtttcctttttgtttgttccatacactgttttgttggctaactgtatgattcgtttgggtagatgcggttgtttgaatgttgcaccagttagaaactttattgaagaaggttgtgacggtgttaccgatctatacgttggtatctatgatgacttggcctccacgaacttcactgacagaattgctgcttgggaaaacattgtggaatgtaccttccgtacaaacaacgtaaagttaggttacttgattgtcgacgagttccacaacttcgaaaccgaagtttacagacaatctcagttcggtggtattactaacttggatttcgatgcctttgaaaaggccatttttttatctggtactgctccagaagccgttgctgacgctgctttacagagaatcggcttgactggtttagctaaaaaaagcatggatattaacgaattgaagcgttctgaagatttgtctcgtggtttgtcatcctacccaactcgtatgtttaatttgatcaaggaaaaatctgaagtccccctaggtcacgttcacaagatctggaagaaggttgaatcccaaccagaggaagctttgaagctactgctggccctgttcgaaattgaaccagaatctaaggctattgttgtcgcttctacaacgaatgaagtagaagaactagcttgttcttggagaaaatactttagagtagtatggattcatggaaaattaggtgctgctgaaaaggtctcccgcaccaaggaatttgtcactgacggatctatgagagtcttaattggtaccaaattggttactgaaggtattgacatcaagcaattaatgatggtcatcatgcttgacaacagattgaacatcatcgaattgatccaaggggttggtagattgagagatggtggtctatgttatttgttatccagaaagaactcctgggctgccagaaatcgtaagggtgaactgcctccaattaaagaaggatgcattaccgaacaagttcgtgaattctacggtttagaatcaaagaaaggtaagaagggccaacatgttggctgttgtggttcccgtactgatttgagtgctgatactgtggagctcatagaaagaatggaccgtctagcagaaaagcaagctaccgcttcaatgtctatagtggcattgccatcttctttccaagaatccaactcctctgatagatgtagaaagtactgttcctccgacgaagacagcaacacttgtattcacggttctgcgaatgcctcgactaacgcaactaccaacagttctaccaatgcaacaactactgcatcaactaacgtcaggacttccgctaccactaccgctagcatcaacgtcagaacttctgctactacaacagagagcaccaactcatctaccaacgcaaccaccacagctagtaccaacgttagaacctcggctactaccactgcttccatcaatgtgagaacctctgccaccactacagaatcgaccaattctaacacctcagccacaaccaccgaatctaccgactcaaatacctctgctactactactgaatctactaactcttccaccaacgctacaaccactgcctctattaatgtcagaactagtgccacgactactgaaagtactaattccaatacaaacgccactaccactgagagcaccaactcttctactaatgctaccaccactgaaggtactaatagcaacacttcagctactactaccgccagtacaaatagttcgaccaacgccaccactacggaatctactaacgcttctgccaaggaggatgctaataaagatggtaacgctgaagataacagattccatccagtaacagatatcaacaaggaatcttacaagagaaagggttcacaaatggttttgctagaaagaaagaagcttaaagctcaattcccaaacacctccgaaaacatgaacgtgttgcaattcctaggtttcagatccgatgaaattaagcacttattcttatacggtattgatgtttatttttgcccagaaggcgtttttactcaatatggtttgtgtaagggttgccaaaagatgttcgagttgtgtgtttgttgggccggtcaaaaagtttcttataggaggatggcttgggaagctctggctgtcgagagaatgttgcgtaacgacgaagaatataaggaatacttggaagacattgaaccttaccatggtgatccagtcggttacttgaaatatttctccgttaagagaggtgaaatctactctcaaattcaaagaaactacgcttggtacttagctatcaccagaagaagagaaactatctccgtcttggactccacaagaggtaaacaaggttctcaagtcttcagaatgtccggtaggcagatcaaagaattgtactacaaggtttggtctaacttaagagagtccaagactgaagttctccagtacttcttgaactgggatgaaaagaagtgtagagaagaatgggaggctaaggatgataccgttttcgttgaagctttggaaaaagtcggtgtctttcaaagattacgttccatgacttctgctggtctacaaggtccacaatacgtcaagttgcaattttcaagacatcacagacaattgagatctagatacgaattgtctttgggtatgcacttgagagaccaattggctttgggtgttactccatccaaggtccctcactggactgctttcttgtccatgttaatcggtttgttctgtaacaaaactttcagacaaaagttggagtatcttttggaacaaatctctgaggtctggttgttgccgcattggttagacttggccaacgttgaagttcttgcggcagacaatactagagttccattgtacatgttgatggttgccgtccacaaggaattagattctgacgatgtcccagacggcagatttgatatcttgttatgtcgtgactcttcccgggaagtcggggaataa

SEQ ID NO: 5132 - DNA, 621 bp, Artificial Sequence
  Optimized genes for Saccharomyces cerevisiae
atggcctcgaccgatttttcaaaaatagaaacgcttaagcagctgaatgcatcactggcggacaaatcctatatcgaaggaacagcggtaagtcaggctgacgtcacagtgttcaaagcttttcaaagcgcgtacccggaattttcacggtggtttaaccacatcgcatctaaagccgacgagttcgactcttttccagctgcgtcggcagccgctgccgaagaggaggaggatgatgacgtagatttattcgggagcgacgatgaagaagcagatgcggaagcggagaagcttaaggctgagaggatcgcagcctacaatgcaaaaaaagcggcgaagccagctaagcctgcggctaaatctattgtgacgctggatgtgaaaccttgggacgatgagacgaatttagaggagatggtggcgaacgttaaggctatagaaatggaaggccttacgtggggcgcacatcaatttatacctattggtttcgggatcaaaaagctacagatcaattgtgttgtcgaggatgacaaggtttcgcttgatgatctgcaacagtcgattgaggaggacgaggatcatgtccaatctaccgacatcgcggcaatgcagaaactctag

SEQ ID NO: 5133 - DNA, 1929 bp, Artificial Sequence
  Optimized genes for Saccharomyces cerevisiae
atgtcgaaggcggtcggaatagatctcggaacgacgtattcgtgtgttgcgcattttgcgaatgatcgagtggatattattgcgaatgatcaagggaatcgcacaacgccaagctttgtcgcatttacagacactgaaagacttattggcgatgcggcaaaaaaccaggctgcgatgaacccttccaataccgtcttcgacgcaaaacgtttaattggtcgcaatttcaacgaccccgaagtgcaggcggatatgaaacactttccattcaagctgatagatgtggacgggaaacctcagatccaggtagagtttaagggcgaaaccaaaaacttcactccagagcaaattagctcgatggtgcttggaaagatgaaagaaacggctgagtcgtacctgggcgctaaggtcaatgatgcggtcgtcactgttcccgcttattttaacgattctcaaagacaggctactaaggatgccggtacgatcgctgggcttaatgtgctccgcatcatcaatgaaccgacagccgccgcgatagcctatgggttagacaaaaaaggcaaggaggagcacgtgttaatctttgacctcggggggggaacgtttgacgtttctctactttccatcgaagatggaatatttgaagttaaggcgaccgcaggggacacgcatctcggcggagaggactttgataaccgcctagtaaaccattttatacaggagtttaaacgcaagaataagaaagatctgagtaccaatcagcgtgctttgcgccgattacgcacggcgtgcgaaagggcgaaaagaacgctgtcctcctctgctcagacatccgtcgaaatcgatagcctattcgagggtatagacttctacacatctatcacacgcgctcgttttgaggagctctgtgctgatttgttcaggtcgaccctagatccagtcgagaaggtactacgagatgccaaattggataagtctcaggtggatgagattgtgctagtgggcggatccacacggatccccaaagtccaaaagctggtgactgattatttcaatggcaaagaacccaatagatctatcaaccccgacgaggctgttgcgtacggtgccgctgtccaagcggctattttaacgggggacgagtcatcaaagacgcaggacttgctactcttggatgtcgcccctttatcccttggcatagaaaccgcgggaggtgtgatgactaagcttatcccgcgcaactccacgatccctacgaagaaatccgagattttctcaacatacgccgataatcaaccaggggtactcatacaggtgttcgagggtgagcgcgcaaaaacaaaggataacaatttgctcggaaaattcgagctttcgggcatccctcctgcacctcgcggtgttcctcagatcgaggtaacatttgatgtcgactcgaacggtatcctgaatgtgagtgcggtcgagaagggtactggaaaaagcaacaaaataacaatcaccaatgacaaaggcagattaagcaaagaggatatagaaaaaatggtggcagaagcggagaaattcaaagaagaagatgagaaagaatcacaacgcatcgcgagcaagaaccagttggagagcatcgcatactccctaaaaaacacaatctcggaagctggggacaaactggagcaagcggataaagacacggtaacaaaaaaggctgaggaaacaatttcatggctagattcaaacacaacagcctcaaaggaagaatttgatgacaaattaaaagaactccaagatatagcaaacccaattatgtctaagctatatcaggcgggtggggcaccagggggtgcagctgggggcgctccgggaggttttcccgggggagctcctccggccccagaagcagaaggccctactgtagaggaagttgattaa

SEQ ID NO: 5134 - DNA, 1503 bp, Artificial Sequence
  Optimized genes for Saccharomyces cerevisiae
atgtcgcgattagaacggcttacgtcacttaatgttgtagccggaagtgatctacgcaggacgtccattattgggaccatagggcctaagacgaataatcctgaaaccctagtcgcgcttcgcaaagccggactaaatatagtacgtatgaatttttcacacggaagctatgagtaccacaaatcagtgattgacaatgcccgtaagagtgaagagctttatcccgggcgacctctggccatcgctctcgacaccaagggacctgaaattaggactggcacaacgacgaacgacgttgattatccaataccgcccaaccacgaaatgatctttacaaccgacgataaatacgccaaagcatgcgatgataaaattatgtatgtggactataagaacattactaaagtcatttcagccggacgaataatatacgttgatgacggcgtattatcgttccaggtgcttgaggttgtcgatgataaaacattgaaggttaaagcattgaatgctggtaaaatatgttcacataagggagtgaacttgcccggcacggatgtcgaccttcccgcgttgagcgagaaggacaaagaagatttgagattcggggtcaagaacggagtccatatggtcttcgcttcatttattaggacggcgaatgacgtcctcacgatcagagaggtgctcggggaacagggaaaagatgtgaagattattgtgaagatcgaaaatcagcaaggtgtgaacaactttgacgaaatactgaaagtgactgacggggtgatggtcgccagaggggatttaggaatcgaaataccggctccggaggtattagctgtccaaaagaaattgatcgctaaaagcaacttagcaggaaaacccgttatttgtgctactcagatgctagaatcaatgacttacaaccctcgccccactcgagcggaggtctccgacgtaggaaacgcgatccttgatggagcggactgcgtgatgctttctggcgaaactgccaaagggaattatccaattaatgctgtaactacgatggctgaaactgctgtaatagcggagcaagcaattgcatatctccccaactatgacgacatgcgtaactgcacacctaagcccacaagtactacggagacggttgctgccagcgcggtcgctgcagtatttgagcaaaaggcgaaagcaataatagttttaagtacatccgggaccacaccgaggttggttagcaagtaccgtccgaactgccccattattttggtaacacgttgcccgagagcggcacgcttttcacatttatataggggcgtgtttccattcgtattcgagaaggagccggtatcagactggacagacgatgttgaggctcgcataaacttcgggattgaaaaggccaaggaattcggtatccttaaaaaaggcgacacgtacgtttctattcaagggttcaaggccggcgctggacactcaaatacccttcaggtttctacggtatga

SEQ ID NO: 5135 - DNA, 513 bp, Artificial Sequence
  Optimized genes for Saccharomyces cerevisiae
atgctgcgtacaactcgcctatggacaactagaatgcctacggttagcaaattattcctacgtaattcaagtgggaacgctctcaataagaataagttgccctttttatacagctctcagggaccgcaagctgtaaggtatacgtcccaacatgaatggattgcggttcatcaagataaaaccgcttttgtgggaataacaaagtatgctactgatgcactaggcgacgcgacctatgtagagctcccagaggttgggacggaaatagcacagggcgaaagcttaggttctatagaatcggttaagtctgcgtccgaaatctatcagccggcggatggcacggtagaggaaattaacactaatctggaggagaatcctggagtggttaatgaggaccctatgggcgatggttggttggtaaaaatgaaacttggcgaaggcgtcaatgtagagcaagtggagggcttaatgtccttagaacaatacgaaaagacactggtgcacgacgattaa

SEQ ID NO: 5136 - DNA, 399 bp, Artificial Sequence
  Optimized genes for Saccharomyces cerevisiae
atgtctggagggaagggagggaaggccggatctgctgcaaaagctagccagagccgatccgcgaaagccggcctaaccttcccggttggacgggttcacaggctcctccgtaggggtaattacgcacagaggattggcagcggggcgccagtctatctgactgctgtcctggagtacctggccgcggagatattagaactggcggggaatgcagcacgggataataagaaaacacgcataattccccgccatctacaattggcgatccggaacgatgacgagctcaacaaattattgggtaacgtgactatagctcagggcggagtcctccctaacatacaccaaaacttgctaccaaaaaagtcggctaagactgccaaagcatcacaagagctgtag

SEQ ID NO: 5137 - DNA, 570 bp, Artificial Sequence
  Optimized genes for Saccharomyces cerevisiae
atggcgaatctaagaacacagaaaagattggctgcgtccgtagtgggtgtaggtaaacgaaaagtatggttggatcccaacgagacttcggagattgcccaggcaaactctcgcaacgctattcgcaagttagtaaaaaatggcacgatcgttaagaaggcagtgaccgttcactcaaagtcccgcacacgtgcacatgctcaaagtaagcgggaaggtaggcatagcggctatggcaaaaggaagggtacccgtgaagccaggctgccttcacaggttgtttggattaggagattacgcgtgttaaggaggttactcgcaaaataccgtgatgcaggaaagatcgacaaacatctataccatgtgctttacaaggagtccaagggaaacgcgtttaagcacaaacgcgcgttggtagagcatatcatacaagctaaggctgacgcacagcgcgagaaagcgttaaacgaggaggccgaggcacgtcgattgaagaaccgggctgcgagagataggcgagcacaacgagtagcagaaaaacgagatgcgctccttaaagaggatgcttaa

SEQ ID NO: 5138 - DNA, 603 bp, Artificial Sequence
  Optimized genes for Saccharomyces cerevisiae
atgggtatttcgcgtgattctcgtcacaaaagatcggctacgggggccaagcgagcgcaattccggaaaaagcggaaattcgaattaggtaggcagccggcgaatacaaaaattggggcgaaacgaattcatagtgttcgcacgcgtggtggtaacaagaaataccgtgcactgcgcatagaaacgggcaatttttcatgggcttcagaggggatttcgaagaaaacgcggattgctggtgttgtttaccatccttcaaataatgagcttgtgcgcaccaacactctgaccaaagccgctattgtgcagatcgatgcgactccctttcgtcagtggtttgaagcacactatggccagacactcggtaaaaaaaaaaatgtaaaggaggaagaaacagttgccaagtctaaaaacgcggaacgaaagtgggccgccagagccgccagtgcaaagatagaatccagcgtagagtcgcaattctccgctgggcgcctatatgcctgcatttctagcaggcctggccaatctggacgctgcgacgggtatatattagagggggaggaactggctttctatctgcggcgtctcaccgcgaagaaataa

SEQ ID NO: 5139 - DNA, 414 bp, Artificial Sequence
  Optimized genes for Saccharomyces cerevisiae
atgagcgggaatggagcccagggtactaaattccgaatctccctcggcctaccggtcggtgcgattatgaattgcgccgacaattcgggcgcacgcaatctttatatcattgcagtcaagggctcggggtcgaggcttaatcgacttccggccgctagtttgggggacatggtgatggcaacagtcaaaaaggggaagcccgaattgcgaaagaaggtgatgccggcaattgtggtccggcaggcaaagtcttggcgaagaagagacggggtgtttctgtattttgaggacaatgcaggagtcatagccaatcctaaaggagagatgaaaggtagcgcaatcactggtccagtaggtaaggaatgcgctgacttatggccccgagtcgcttcgaactcaggagtagtagtttaa

SEQ ID NO: 5140 - DNA, 393 bp, Artificial Sequence
  Optimized genes for Saccharomyces cerevisiae
atggcgagcttaccccacccaaagatcgttaagaaacatacaaaaaagttcaaaaggcaccattcggaccgttaccatcgtgtcgctgaaaattggcgaaaacaaaaaggtatagattctgtagtgcgtaggcggttccgagggaacatctcacaacccaaaatcggttacggatcaaacaagaaaacgaaattcctctccccgtcgggtcacaaaacctttctcgttgcgaatgtcaaagatctcgaaactttgactatgcatacgaagacatatgcagccgaaatagcacataatatcagtgctaagaacagagtggtgatactggccagagcgaaggcattaggcatcaaagtgacaaaccccaagggtcgactagccctcgaagcatag

SEQ ID NO: 5141 - DNA, 411 bp, Artificial Sequence
  Optimized genes for Saccharomyces cerevisiae
atggcccgtacgaagcaaactgctagaaagtcaaccggtgggaaagctccgcggaaacagttggcctcaaaagccgcccggaaaagcgcgcccagtacgggtggtgtcaaaaagcctcatcgctataagccgggcacagtagctctccgcgagattcgtagatttcaaaaatcgacggaattgttaatccggaagttgccgtttcaacgtcttgtccgcgaaattgcgcaggattttaagactgatttgcggtttcagtccagtgccataggcgctttacaggaatccgtagaagcgtacctcgtgagtttgtttgaggacaccaacctagcggccattcatgcaaagcgtgtaactattcagaaaaaagatattaagctggcgagacgactccggggcgagcgttcttag

SEQ ID NO: 5142 - DNA, 864 bp, Artificial Sequence
  Optimized genes for Saccharomyces cerevisiae
atgacctatactacgaggcaaattggggcgaaaaatacacttgaatacaaagtctacattgagaaggatggtaaaccggtatccgcattccacgacatccctctgtatgcggataaagagaacaacatcttcaatatggtggtggaaatacctcgctggacgaatgcgaaattagaaattaccaaagaagagacattaaatccgattattcaagacacaaaaaagggcaagctgcgtttcgtaagaaattgcttcccccaccatggttacatacataattatggagcatttccccaaacttgggaagatcccaacgtttcccacccggaaaccaaagccgtgggagacaacgatcccatcgatgttctcgagataggtgaaaccatcgcctatacggggcaggtcaaacaagttaaagcactcggtataatggcgctactggatgagggcgagacggactggaaagtgatcgccatagatataaacgacccgctagcgcccaagctcaacgacatagaagacgtcgaaaaatactttccgggcctgcttcgagcaacaaatgagtggttccggatctataagattcctgacggaaaacccgagaaccaattcgccttttccggcgaagcgaaaaataagaaatacgctctggatataattaaagagacccacgatagttggaaacaactaatagccgggaaaagttcggattcaaaggggattgacctgactaatgttaccctacctgacactcctacatattcaaaagcagcatctgatgctatccccccggccagtcccaaagctgatgcgcccatagataaaagtattgacaaatggtttttcatatcgggctctgtgtaa

SEQ ID NO: 5143 - DNA, 936 bp, Artificial Sequence
  Optimized genes for Saccharomyces cerevisiae
atgttgagtcgaattgtcagtaacaacgccacacgatccgtcatgtgccatcaagcgcaagtcggtatcctctacaagactaaccctgttcggacctatgcaaccttgaaggaagttgaaatgcgattaaaaagtatcaagaatattgaaaaaataaccaaaaccatgaagatcgtagcgagcacgcgactcagtaaagccgagaaagcaaagatctctgccaaaaagatggacgaagcggagcagctcttctacaaaaatgcggagacaaaaaacttagatgtagaggcaaccgaaacgggcgcccccaaggaattgattgtagctattacttctgacaagggtctttgtgggagtatacactcgcaactggcaaaggcggttcgacgacacctaaatgaccagccgaacgccgatattgttacgataggagataaaataaagatgcagctccttaggacccaccctaacaacatcaagctaagtatcaatggcattggtaaagatgctcccaccttccaggagagtgcgttaatagctgataaattacttagcgtgatgaaggccggaacctacccgaagatctctatattttacaatgaccctgtctcctccttatcttttgaaccctctgagaaacccatctttaacgcgaagacaatagaacaaagtccctcattcggtaaatttgaaattgacacagatgcgaatgtacctcgagacctctttgaatacaccctcgctaaccagatgctaacagctatggcgcaaggatatgcagctgaaataagcgcacgtcgtaacgccatggacaacgccagcaaaaatgcgggcgatatgattaatcgttattccattttgtataatcgcacgagacaagctgtgataaccaacgaactagtggacatcatcacgggagcaagctcgctggggtga

SEQ ID NO: 5144 - DNA, 471 bp, Artificial Sequence
  Optimized genes for Saccharomyces cerevisiae
atgagtactgagctcactgttcagtcagaaagggcttttcagaaacaaccccacatatttaacaatcctaaagtgaaaacgtctaaacgtaccaagaggtggtacaagaacgctggccttggtttcaaaaccccgaagacggcgattgaggggagttacattgataaaaaatgtccttttaccgggctcgtttcaatcagaggtaaaatcttaactggtactgttgtatcgacaaaaatgcaccggacgatcgtcatacgccgagcgtacttgcactacattccaaaatataaccgttatgaaaagcgtcacaagaatgttccagttcacgtatcaccggcattcagagtacaagtcggagatatagtaactgtcggccaatgccgaccaatcagtaaaacagtgcgatttaacgtcgtcaaggtttcagcagctgcagggaaggccaacaaacagtttgcgaaattttag

SEQ ID NO: 5145 - DNA, 633 bp, Artificial Sequence
  Optimized genes for Saccharomyces cerevisiae
atgtcggtcagcaaaatcgctttcgtgctgtcagctatcgcaagtttagcagtggcggatacatcagcggccgagacggctgaactacaagcaataattggtgacattaactcacatttatccgactatctcggtttggaaactggaaactcgggttttcaaataccatccgatgtcctgagtgtgtatcaacaagttatgacgtacacagacgacgcctatacaacgctattctcagagctcgattttgatgcaatcactaagacgatagtgaagcttccgtggtatactacccggcttagcagtgaaattgctgctgctctagcttcagtatcacccgcctcctcagaagcagctagtagctcagaagctgcttcttcgtcgaaagcagcgagctcctccgaggcaacctcgagtgcagccccttccagctctgcggctccatccagttctgcagctcccagctcgtcggcagagtcatctagcaaagcggtctctagcagtgtcgctccaaccactagcagcgtctcgacatctaccgtggagacggcgtcaaacgccggacaacgggttaatgccggtgcggctagcttcggcgctgttgttgcaggcgcggcagccctcctattgtag

SEQ ID NO: 5146 - DNA, 1290 bp, Artificial Sequence
  Optimized genes for Saccharomyces cerevisiae
atgcagttcaaaaatgctttgacagcaactgcgattctcagcgcatcggcattagcagcaaattccactacatcaattccatcgtcgtgcagtatcggcacctcggccaccgccacggctcaggcagacctcgataaaatttcaggttgctcaactattgtcgggaatctcacaattactggcgatttgggttcggcagcgctagccagcatccaggaaatcgatggcagtttgacaatattcaactcttcctcgctttcctcattctccgccgacagcattaagaaaataaccggtgatttaaacatgcaggaactgataattctaacgtcagctagcttcggcagcctccaagaggttgattctatcaacatggtcacactccccgcaatctcgacatttagcactgacctgcaaaatgctaacaacattatcgtatcggataccacgctggaatcggtagagggattttcgactctcaaaaaagtcaatgtgtttaatattaacaacaatagatacctaaattcttttcagagttctctagaatcggtttcggactctttacagttctcttccaatggagacaatactactttggcatttgacaatctcgtgtgggccaataacatcactcttcgcgacgtaaattctatatctttcggtagcctacaaaccgtaaacgcgtctctaggctttatcaacaacaccctgccttcgttgaacttgacccaactcagcaaggtaggacaatcgctatcgatagtatctaacgacgagttatcgaaggctgcgttttcaaaccttacaactgtcggtggtggctttataatagcgaacaatacccaactgaaagtaatcgatggctttaacaaggtacagacggtgggaggagcaatagaggttacagggaatttctcaactctggatctgagttcactaaaatccgtgcgaggcggtgctaattttgactcgtcatcatccaacttctcttgcaatgcgctcaaaaaactacaaagcaatggcgctatccaaggtgactcttttgtttgtaagaatggagccacgtctacaagtgtgaagctaagttccacttcgaccgaatcctcaaagtcgtccgccacttcctccgcgtccagctctggtgacgcttctaatgcgcaagcgaacgtgtctgcgtcggcctcgtcgtcatcgtcaagttccaagaaaagcaaaggcgcagcacctgaactggtccccgcaacaagctttatgggggtcgtggccgcggttggggtggcacttctttga

SEQ ID NO: 5147 - DNA, 447 bp, Artificial Sequence
  Optimized genes for Saccharomyces cerevisiae
atgtcatcgtctaaaagaatcgcaaaggagctgtcagatttggaaagggaccccccgaccagctgctccgccgggccggtaggggacgacctgtaccattggcaggcctccataatgggcccggcagactcaccatacgcaggaggggtattttttctatccatacatttcccaactgactatccattcaagccgcccaagataagcttcacaacaaagatttaccacccgaatatcaatgcgaatggtaatatatgcctagacatattgaaagatcaatggtcgcctgctcttactctgtcgaaggtcctcctgagtatatgttctttattaacggatgccaaccctgatgatcctttggttcctgagatcgctcatatctataaaactgacagaccgaagtacgaggccacggcacgagaatggaccaaaaaatacgccgtctaa

SEQ ID NO: 5148 - DNA, 567 bp, Artificial Sequence
  Optimized genes for Saccharomyces cerevisiae
atgaatccgcaggtcagtaacattatcataatgctagttatgatgcaactcagcagacgtatagatatggaagatcctacaatcataatgtacattcgcattttatactgctcctctataggtatcagttggatcatttatcaaatggcccgcaagaggattgtcgctaaaaacgatatgacaacaatgaaatacgtcgaaccgggcaatgccatgtcgggcgaaggagagaaactccaagttaccaccgtaagagattacgatctgaaagagatagattccgccatcaagtctatatacactggcatggccatgatgggctttatgcacctctatttaaaatatacgaaccctcttttcatgcaaagtatatcaccagttaaaagcgcgcttgagcacaacgaagttaagattcacttattcgggaaacccgcgaccggggatcttaagaggccctttaaggcgccgtcattattcggaggtatgggacagacgggtccgaagacggataagaaatcaatagaggaagccgagagggctggcaacgcgggtgtcaaggccgaatag

SEQ ID NO: 5149 - DNA, 483 bp, Artificial Sequence
  Optimized genes for Saccharomyces cerevisiae
atgggcaagagtcatggctatagatcccgtactcgatacatgtttcaaagggactttcgaaaacatggcgcggtgcacttaagtacttatctcaaggtctacaaagtgggtgatatagtcgacataaaggccaatggatccatacaaaaaggaatgccccataaattttatcaagggaaaacaggtgtcgtctataacgtgaccaaatcgagcgtcggggttataattaacaaaatggtaggtaataggtacttagaaaaacgtctcaacttgcgtgtggagcacattaaacatagcaaatgccgccaagaattcttagaacgagtcaaagcaaatgcggctaagcgggcggaggcaaaagcgcaaggcgtggccgtccagctcaaaagacagcctgcccaaccacgtgaatcgaggatcgtgtccaccgagggtaacgtaccgcaaacattagctcccgtgccttatgaaactttcatttga

SEQ ID NO: 5150 - DNA, 1665 bp, Artificial Sequence
  Optimized genes for Saccharomyces cerevisiae
atgagcaacaactcttttaccaatttcaaactggcaactgaattaccggcctggagtaagttacaaaaaatctacgagtcacagggaaagaccctgtccgtaaaacaggaatttcagaaggatgcgaagaggttcgaaaagctaaataagaccttcactaactacgacggcagcaaaattctgtttgactattctaaaaacttggtgaatgacgagataatagcggcgctgatcgagctggcgaaggaggcgaacgtgaccggcctacgcgacgctatgttcaagggtgaacacatcaacagcaccgaggatcgagctgtttaccatgtagcgctccgtaatcgcgctaacaagcctatgtacgttgatggtgtcaacgtcgcccccgaggtagattcagtattgaaacatatgaaggagtttagcgaacaggtcagaagtggtgaatggaagggatatactggtaaaaagattaccgatgttgtcaatattggtattggcggaagtgatcttgggccggtgatggtaactgaagcactaaaacactatgcgggagtgttagatgtgcattttgtcagcaatatcgacggtacgcatatcgccgagactctaaaggtggttgaccccgaaacgacacttttcctgatcgcttcaaaaaccttcaccaccgccgaaaccattacgaacgcgaatactgccaagaactggtttttgagtaagacaggtaacgatccatctcatatagcaaagcatttcgctgctttgagcacaaatgaaaccgaggtggcaaagtttggaatcgacacgaaaaacatgttcggcttcgagtcttgggtcggcggccggtactcagtatggtcggccataggattatcagttgctctctacatagggtatgataacttcgaagccttcctgaagggtgcagaagctgtcgataatcattttacacagacccctcttgaggacaacatcccactactaggcggtttgctgtcagtctggtacaacaacttcttcggggcacagactcaccttgtggcaccgtttgatcagtatcttcatcgcttcccagcttacctacaacaactatcaatggagagtaatggtaagtctgtaacccggggaaacgtttttactgattacagcacaggctcaatcctattcggggaacctgcaacgaacgcccagcactcattttttcagctggtccatcaggggactaagttgatccctagcgacttcatactagccgcccagtcacacaatcccattgaaaataagctccatcaaaagatgctggcatcaaactttttcgcgcaggcggaagctcttatggttggtaaggatgaggagcaagtcaaggcggagggagcaacgggcgggttagtaccgcacaaggtcttctctggcaaccgtcccactacctccatattggctcaaaagataactccggcaacattaggtgctctcattgcttactacgagcatgtcaccttcacggagggtgccatatggaacatcaatagcttcgatcaatggggtgtagagcttggcaaggttcttgcaaaagtcattggaaaagagctcgataatagctcgaccatatccacccacgatgcctctaccaacggcttgataaatcagttcaaggagtggatgtga

SEQ ID NO: 5151 - DNA, 1614 bp, Artificial Sequence
  Optimized genes for Saccharomyces cerevisiae
atgcacttctcgcttaaacaactcgcggttgccgctttttatgcaacgaacttaggcagcgcttacgtaatccctcaattctttcaagaagccttccaacaggaggaacccatcgagaattaccttccgcaactgaacgacgatgattctagtgcggttgccgcgaacattcctaaaccacacataccttacttcatgaaaccacatgtcgaatctgagaaattgcaagataagattaaagtggatgatcttaacgcgacagcatgggacctgtataggctagcaaattactcgacgcctgactatggccatcctacccgtgttattggaagcaagggacacaacaagacgatggaatacatcttgaatgtgttcgacgacatgcaagactattatgacgtgagtctacaggaattcgaggcgctaagcggtaaaataatctcatttaacctttcggatgctgagaccggtaagagcttcgcaaatactactgcatttgctttgtccccacccgtagacggctttgtcggcaaacttgttgaaatccccaacctcgggtgcgaggaaaaagattacgctagtgtagttccgccgcgccataacgagaaacagatagcccttattgaacgagggaaatgcccttttggcgataagtcgaacctggctggcaaattcggtttcaccgcggtcgttatttacgataacgaaccgaaatctaaagaaggtttgcacgggacgctcggcgaaccgacaaagcatactgttgctactgtcggagtaccctataaagttggtaaaaagttgatcgccaatatcgcactgaacattgattacagcctgtatttcgctatggattcttatgtagaattcatcaagacacaaaacattatagctgataccaagcatggagaccctgacaacatagtagctctaggtgcgcacagtgactccgtagaggaaggacccggcataaacgacgacggctcgggaactatcagcttactgaacgtcgcgaagcaattaacgcacttcaagataaataataaggtgcgtttcgcctggtgggcggccgaggaagaaggcttgttaggctcaaatttctacgcttacaatcttaccaaggaggaaaattcgaaaatccgtgtttttatggattacgacatgatggcttctccgaactacgagtatgagatatatgacgctaacaacaaagagaatccgaaaggatcagaggaactgaaaaacctttacgttgattattacaaggcgcaccacctgaattacacgttagtcccttttgatggacgctcggactatgtaggattcattaataatggaattcctgctgggggcatagctacaggtgccgaaaagaacaatgttaacaacggaaaagttctagatagatgctatcaccaattgtgcgacgatgtatcaaacctatcgtgggatgcatttatcacaaacacaaaattaatcgcccattcggtcgcgacgtatgccgactctttcgaagggttcccaaagagagaaactcagaaacataaagaggtcgacatactcaatgctcagcaacctcaatttaaatatagagcggacttcttaataatttga

SEQ ID NO: 5152 - DNA, 1095 bp, Artificial Sequence
  Optimized genes for Saccharomyces cerevisiae
atgagcgctccgaagaagattgtagtgctgccgggcgaccatgttggtcaagaaattactgcggaggccatcaaagttctgaaggcaataagcgatgttcgctctaacgttaagtttgatttcgagaatcatctaattggtggcgcggctatcgacgcaacgggcgtacccttaccggatgaagcgttggaggcctctaagaaggcagatgctgtccttcttggtgctgtcggcggcccaaagtggggaactgggtctgttcgccccgaacaaggcttgttaaagataagaaaggaactgcagttatacgccaacttaaggccttgcaacttcgcatcggactctttacttgatttatctccaataaaacctcagtttgctaaggggaccgatttcgtggtggtgcgagaactcgtcggggggatttactttggtaaacgtaaagaggacgatggggatggagtcgcctgggactccgaacaatacacggtcccggaggtacagcggatcactaggatggctgcatttatggcgctgcagcatgaacccccactccctatatggtccctcgataaagcaaatgtgctagcatcatcgcgtctatggaggaagacggtcgaggaaacaataaaaaatgagttcccgacgctgaaagtgcaacatcagctaattgattccgcagccatgatcttggtcaagaaccctacacacctcaatgggatcatcataacctcaaatatgtttggggatatcataagcgacgaagcttcagttatcccgggatcactcggattgttaccatccgctagcttggcatcactacctgataagaatactgcttttggtctttacgagccctgccacggcagcgccccagacctaccgaaaaacaaagttaacccaatcgctaccattctaagcgccgctatgatgctaaagctttctcttaacttgcctgaggagggcaaagccatcgaggacgcagtaaagaaggtactagacgctggcatacggacgggtgacctcggtggttcaaactcgacgaccgaggttggggacgccgtagccgaggaggtaaaaaagatattagcctaa

SEQ ID NO: 5153 - DNA, 2400 bp, Artificial Sequence
  Optimized genes for Saccharomyces cerevisiae
atggttctacccattttaccgctgatcgatgatttagcgtcgtggaactccaaaaaggaatatgtatcattagtagggcaagttctcttggacggatcatccttatccaatgaagaaatactgcaattctccaaggaggaggaggtacctctggtagccttatctctcccgtccggtaagttttctgatgatgagatcatagcgtttttaaataacggggtttctagtttattcattgcgtctcaggacgcgaaaactgccgaacacctggtagagcagctgaatgttcctaaagaaagggttgtggtcgaggaaaacggggtatttagcaatcagttcatggttaagcaaaagttcagccaggacaaaatcgtaagtattaaaaaactctcgaaggatatgctgacaaaagaagttttaggggaggtgcggactgacagaccagatggtctgtatactaccctagtggtagaccagtacgaaagatgtctaggattagtctactcatctaagaaaagtatcgcaaaggctatagacttgggaagaggtgtgtattactcgaggtcaaggaacgaaatttggataaaaggtgagacctcggggaatggccagaagcttttacaaatctcaactgactgcgactcagatgcgttgaagttcatcgttgagcaggagaacgtcgggttctgccacttagaaacaatgtcttgctttggggagtttaagcacggcttagtcggtctcgaatcgttattaaaacagcgccttcaagatgcaccagaggaatcttatacccgtcgcttgtttaatgattctgccttactagatgccaaaattaaagaggaagcagaggagctgacggaggcaaagggaaaaaaagagctttcgtgggaagcagcagatctcttttactttgcgttagcaaaactggtggcaaatgatgtgagccttaaggatgtcgaaaacaacctcaatatgaaacatctgaaagtgactcggcgcaagggagacgcaaagcctaagttcgtcggacaaccgaaagcagaggaagagaagctgacagggccgattcatctcgatgtggttaaggcgtcagacaaggtcggtgtccagaaagccttgtcgagacccatccaaaagacaagtgaaatcatgcacctggttaacccaattatagagaacgtaagagacaagggcaacagtgcgctcctggagtacacagaaaaatttgatggagtgaagttgtcaaaccccgtgctgaacgcgccgtttccagaggagtactttgaaggtctgacggaagaaatgaaggaagcacttgatttatcaattgagaatgtcagaaagttccacgcagctcaactcccgaccgagactctagaagtagaaacgcaacctggcgtgctctgttcacgcttccctcgtcccattgaaaaagtcgggctctatattcccggtggtactgccatcctcccgtccactgcattgatgctcggcgtaccagcacaggtagcgcagtgtaaagaaatagttttcgcgagcccaccgcgcaagagtgacggaaaggtctcaccggaggtggtttatgtagccgaaaaggttggtgcatctaagatcgttttggctggtggggctcaagcggtcgcggcaatggcgtacggcacagaaacaattcctaaagtcgataaaattctgggaccgggcaaccaattcgtgacggcggccaaaatgtacgtacagaatgatactcaagctctgtgtagtattgatatgcccgcgggtcccagcgaagtgctagttatagccgacgaggatgctgacgtggattttgtcgcttctgatctactatcacaagcagaacatggcatagactcccaggtgatcctcgttggggtcaacttgagtgaaaagaaaatacaggagattcaggatgccgttcataatcaggccctacagcttcctcgcgtcgacattgttcgcaagtgtattgcacattcgacgatcgtgctttgcgacggttatgaagaggcgcttgagatgtcaaatcaatatgcacctgagcacttgatattgcagattgccaatgcgaatgactacgtcaaattggtcgacaatgcgggttctgttttcgtcggagcttataccccggaatcctgcggcgactatagctccggaactaaccatacgcttcccacatatggctacgctcggcagtattccggagctaataccgcgactttccagaagttcattacggcgcagaacattactcccgagggcctggagaacataggtcgtgcggtaatgtgtgttgcaaaaaaggaaggactggatgggcatcgaaacgccgtaaaaattcgcatgagtaagttggggctgatcccgaaggacttccagtag

SEQ ID NO: 5154 - DNA, 333 bp, Artificial Sequence
  Optimized genes for Saccharomyces cerevisiae
atggttagccaggagacaattaaacatgtcaaagatttaattgctgagaatgaaatcttcgtggcttcgaagacgtattgtccctactgccatgcagctttaaatacccttttcgaaaaactgaaagtgcctaggtctaaagttctagtcctccagctgaatgatatgaaagaaggtgccgatatacaggctgcgctttatgaaatcaacggtcaacggaccgtcccaaacatctacataaatggtaagcatatcgggggcaatgacgatctacaagaattgcgtgaaacgggagaattggaagaattgcttgaacccatactagcgaactaa

SEQ ID NO: 5155 - DNA, 1503 bp, Artificial Sequence
  Optimized genes for Saccharomyces cerevisiae
atgagttttgatgatctacacaaagcgaccgaacgggcagtaatacaagcggtggatcagatctgtgatgacttcgaggtaactccagaaaagctcgacgagctgactgcatacttcatcgaacaaatggagaaaggtctcgcgcctccgaaagaggggcatactctggctagcgataaaggcctgccaatgatacctgctttcgtgaccggaagtcctaatgggacagagcgcggggtgttactagcggccgacttaggcggcaccaacttccggatttgctcggtgaacctccatggtgatcacactttcagcatggagcaaatgaaaagcaagatccctgatgacttgttagatgatgagaatgttacgtcagatgatttgtttggcttccttgcccggcgcactctggcatttatgaagaaataccaccctgacgaacttgccaaggggaaagatgccaaacctatgaaattgggctttaccttttcttatcctgtagaccaaacctcgttgaactccggtacgttaatacgatggacaaaggggttccgaatagcggacacggttggaaaagacgtagtacaattgtaccaagaacaactatcggcccaggggatgcccatgatcaaagttgtggccttaaccaacgatactgttggtacttatttgagtcattgctacacgtcggacaatactgactcgatgactagtggtgaaatatcggagcccgtgattgggtgcatcttcggaacaggaactaatggctgttatatggaagaaataaacaaaattacaaagctccctcaggagctcagagacaaacttataaaagaagggaaaactcacatgataatcaatgtcgagtggggaagcttcgacaatgaattgaaacacctcccaacgaccaaatatgacgtcgtaatcgaccaaaaactatcaacaaatccggggtttcatttgttcgagaaacgcgtcagcgggatgttcctcggggaagtcctgcggaacatactagtcgatctacactctcagggactgctcctgcaacagtatcgctcgaaagagcagttgcctcggcatcttacgacaccgtttcaactctcgtcggaagttttatcacacatagagattgatgactcgacaggtttaagagagaccgagctatcccttctgcaaagtttgcgactgcccacaacacccaccgagagagttcaaattcagaaattagttcgggcaatctcacgacggagcgcttatcttgccgctgttccacttgccgctattttgataaaaactaacgctttaaacaagcgttatcacggagaagtagaaatcggctgtgatggatcggtagtcgaatactatcctgggtttcgaagtatgctacgacatgcactagcccttagccccctcggcgcggagggggagaggaaagtgcacctcaaaatcgccaaagacggtagtggggtaggagctgcattgtgcgctttggtcgcttag

SEQ ID NO: 5156 - DNA, 1569 bp, Artificial Sequence
  Optimized genes for Saccharomyces cerevisiae
atgaagttctcagcaggcgctgttctgagttggtcaagcttgttgttggcgtcctccgtgtttgcccagcaagaggcggttgcaccagaagacagtgcagttgtgaagcttgctactgacagcttcaacgagtacattcaatcgcacgacttagtcctcgccgagttttttgcaccttggtgtggccactgtaaaaatatggcacctgaatacgtcaaagctgctgaaacccttgtagaaaaaaatataacactagcacagattgactgtacggagaatcaagacctctgcatggaacataatatacctggttttcctagtctcaaaatatttaagaatagcgatgtaaacaacagcattgattatgagggacctaggacggcggaggcgatagttcagttcatgattaagcaatcgcagccagcagtggccgtagtcgctgatttgcctgcctacttggcgaatgagacctttgtaacgccggtaatcgtccagtcaggcaagatcgatgccgacttcaacgccacgttctactctatggcaaacaagcattttaacgattacgattttgtttctgctgaaaatgccgacgatgacttcaaactaagtatctaccttccttcggcaatggatgagcccgttgtatataacgggaagaaagccgacatcgcagatgctgacgtgtttgaaaaatggttgcaggttgaagcacttccgtattttggagaaatagatggatctgtctttgcgcagtatgttgaatcgggcttgccactgggatatttgttttacaatgatgaggaggagctggaagaatacaagcctctattcactgagctggctaagaaaaatagaggcttgatgaactttgtctcaattgatgctaggaagtttggtcggcatgcggggaacctgaatatgaaggaacagtttcctctgttcgcaatccatgacatgacagaggacttgaaatacgggttaccccaactctcggaagaagcgttcgacgagctaagcgataagatagttttagaaagtaaagcgatagagtcccttgtcaaagactttctaaaaggggatgcatctcctatagtgaagtcgcaagagatttttgagaatcaagacagtagcgtgttccaattggtcggaaagaatcatgacgagattgtcaatgacccgaaaaaagacgtccttgtactttattatgcgccgtggtgtggccattgtaagcgactggcccccacctaccaagaactcgccgacacgtatgcaaatgctacgtctgacgttctgattgccaaattagatcacactgaaaacgacgtaagaggcgtagtcatcgagggataccccaccatcgtgttataccccggcggtaagaaatccgagtccgtcgtctatcaaggtagtcgttcactcgattctttgtttgactttatcaaggagaatggacattttgatgtagacgggaaagcgttgtacgaggaagcgcaggagaaagcagcagaggaggcggatgcggatgcggagttagcagacgaagaagacgccatacacgatgaactatag

SEQ ID NO: 5157 - DNA, 1251 bp, Artificial Sequence
  Optimized genes for Saccharomyces cerevisiae
atgagcctttcaagcaagctctcggtccaagatctcgaccttaaggacaagcgcgtctttatccgcgtagattttaacgtaccgcttgacggaaaaaaaataactagtaatcagcgcatcgttgcggccctcccgactattaaatatgtcctagaacaccatcctcgatacgtggttctcgcctcgcatttaggtcgccctaatggtgaaaggaacgaaaagtattccctggcgcctgtcgccaaggagttacagtccctccttggcaaagacgtaaccttccttaacgactgcgtaggtccagaagttgaagctgccgtcaaagcgtctgctcccggatccgtaatattactggaaaatttaagataccacatagaagaagaggggtctaggaaagtcgacgggcagaaggtcaaggcatcgaaggaagatgtccagaagttccgacacgagctgagctcgttggccgacgtctatataaacgacgcatttggcacggcccacagagctcactcatcgatggtgggtttcgatttaccgcaaagagctgccgggtttcttctagaaaaagagttgaagtactttggcaaagcgttggagaaccccactaggccgttcctggcaattctggggggcgctaaggtggccgacaagattcaacttatagacaatctacttgacaaagtagatagtataattattggcggcggcatggccttcacattcaaaaaggtgttggaaaatactgaaataggtgactccatatttgataaagctggggctgagatcgtgcccaaacttatggagaaagcaaaagcgaagggtgttgaggtggttttgccggttgactttataatagcagacgccttttctgcagatgccaacacgaagacggttacagacaaggagggtatacctgccgggtggcaaggattagacaatgggccagaatcgcgaaaactgttcgcagctacggtggcgaaagcgaaaacaatcgtttggaacgggccaccgggggtttttgaattcgaaaagtttgcggctggtacaaaagctctcctcgatgaagtcgtgaaatccagtgccgctgggaatacggtcataattggcgggggcgatacagcaaccgttgcgaagaaatatggcgtaacagacaagatcagtcacgttagtactgggggtggggcaagcttggagcttctcgaggggaaggagctgccaggagttgcctttctttcggaaaaaaaataa

SEQ ID NO: 5158 - DNA, 1086 bp, Artificial Sequence
  Optimized genes for Saccharomyces cerevisiae
atgaaagggctaattctggtgggaggttacggaacacgactgcgacccctgacgcttacggttccaaagccgttagttgagtttggtaaccggcctatgatactgcatcagattgaggctttggctaatgcaggcgttaccgacattgtacttgcagtaaattatcgtcctgaagttatggttgaaaccctgaagaaatacgagaaagaatatggggttaatatcacatttagcgtagagacggagccgctagggacggcgggaccattgaagcttgcagaggatgtgttgaagaaagataactcgcccttcttcgttcttaactcggacgttatctgcgaataccccttcaaggaattggcggattttcacaaagctcatgggggtaaagggacgatagtagctaccaaggttgacgaacccagcaagtatggcgtaattgtacacgacattgctactcctaaccttatcgacagattcgtcgaaaagcccaaagagttcgtaggtaacagaatcaatgcagggctatacattcttaacccagaggtgatagatctaatagaaatgaagccaacatcgatcgagaaagagacttttccgattctggtcgaagaaaagcagctgtactcgtttgacctagaaggcttttggatggacgtagggcaacccaaagattttctatcaggaactgtcctatacctgaattcccttgcaaaacgacaacctaaaaagcttgcgactggagccaacatagtcggcaatgcgctaatcgatcctactgcgaaaataagttcgacagcgaagattggccccgatgtagtaattggacccaatgtcacaataggcgacggagttcgaatcactcgctccgtggtgctgtgcaattcaaccatcaagaatcattcgctggtgaaatcaaccatcgttggttggaactcaaccgtgggtcaatggtgcagactggagggcgtgacggtgcttggagatgatgtcgaagtcaaggatgagatatatataaacggtgggaaagttctgccacataagtcgataagcgataacgtaccgaaggaggctatcataatgtaa

SEQ ID NO: 5159 - DNA, 171 bp, Artificial Sequence
  Optimized genes for Saccharomyces cerevisiae
atggcacacgagaacgtatggttttcacacccgagaagatttggtaaaggctcacggcaatgcagagtctgctctagccacactgggttggtccgaaaatatgatctaaatatctgtagacaatgttttagagagaaagcaaatgacatcgggttccacaagtacaggtaa

SEQ ID NO: 5160 - DNA, 180 bp, Artificial Sequence
  Optimized genes for Saccharomyces cerevisiae
atgacgatagcgccgatcaccggcaccatcaaacgacgtgtaatcatggacatcgttttgggctttagcctgggaggcgttatggcatcctattggtggtggggatttcatatggataagataaacaagagggagaagttttacgctgagctcgcggaaagaaaaaaacaagaaaactaa

SEQ ID NO: 5161 - DNA, 342 bp, Artificial Sequence
  Optimized genes for Saccharomyces cerevisiae
atggctggactgaaggatgtggtgacacgtgaatatactataaacctgcacaagagattgcacggggtcagtttcaagaagcgtgccccacgagccgtaaaagaaataaagaaattcgcgaaacttcacatgggcacagatgacgtgaggctggctcctgagctaaatcaggccatatggaaacgtggagtcaagggagtcgagtatcgtcttcgactacgcatttcccgaaaacgtaatgaagaagaggacgctaagaatccgctcttttcatacgtggaacccgtgttagttgctagtgcaaagggcctccaaacggtggtggtggaagaggatgcttag

SEQ ID NO: 5162 - DNA, 321 bp, Artificial Sequence
  Optimized genes for Saccharomyces cerevisiae
atgagcaccgagagcgctttgtcctatgctgccttgattctcgctgactccgaaattgagatatcatccgagaagctgttgactctgacgaacgcagctaatgtacccgtggagaatatttgggctgatatatttgccaaggcccttgacgggcagaacctgaaggacttacttgtcaacttctctgcaggcgcggctgcccccgctggcgttgccggtggggtcgccggaggggaagcgggtgaagctgaagcggaaaaggaggaggaggaggccaaagaagaatctgacgacgatatgggttttggacttttcgactag

SEQ ID NO: 5163 - DNA, 600 bp, Artificial Sequence
  Optimized genes for Saccharomyces cerevisiae
atggcaattagtaaaaacttaccaattctcaaaaatcatttcaggaagcactggcaagagcgagtaaaggtacactttgatcaggccggaaaaaaagttagtagacgcaatgcacgcgcaacccgcgcggcgaagattgcaccacgacctctggacctcttgcgacccgtggttcgggcacctactgtaaaatataatcgcaaagtacgcgcgggaagggggttcactctcgcagaagtgaaagccgcaggcctgacggccgcttatgcgagaacaattggtattgcggtggatcatcgccgccagaacaggaatcaagaaatttttgatgcaaatgttcagcgtctcaaggagtatcagagcaaaattatcgtatttccacgtaacggaaaagctcccgaagctgaacaggtcttgagcgctgctgctacatttcccatcgctcaaccggcaacagatgtcgaagctagggctgtacaggacaatggcgagagtgcttttcgaactttaaggctcgcccgctctgaaaagaagtttcgcggcattcgcgagaaaagagcacgcgaaaaagctgaggctgaagcggagaagaaaaagtga

SEQ ID NO: 5164 - DNA, 477 bp, Artificial Sequence
  Optimized genes for Saccharomyces cerevisiae
atggagccgttgatatcagccccgtacttaacgactacaaagatgtcagctcccgccacactagacgcggcatgcatcttctgcaagattatcaaatcagagattccttcatttaaattaatcgaaacgaaatatagttatgcttttctagacattcaaccaacagcggaaggccacgctttgataattccaaagtatcatggggctaagttacacgatatacctgacgagtttcttaccgatgccatgcccattgcaaaacggttggcaaaagccatgaagttagacacttacaatgtcttgcagaataatggtaagattgcccaccaggaggtcgatcacgtgcacttccatttaattccaaaaagagacgagaaaagtggccttatcgtcgggtggcccgcacaggaaacagacttcgataagttgggcaagctccataaggaattgctagccaaactcgaagggagtgactga

SEQ ID NO: 5165 - DNA, 321 bp, Artificial Sequence
  Optimized genes for Saccharomyces cerevisiae
atgtccgactcgattatttcgtttgcagctttcatattagctgatgcaggactcgaaatcactagcgataatctgttgactatcaccaaagctgctggcgctaacgtagataacgtgtgggcggatgtctacgctaaagcactagaagggaaggaccttaaggagatattgtccgggttccataatgcaggtccagtggcgggagcaggagctgcgtcaggcgccgctgcagccggaggagatgctgcggctgaagaggaaaaagaggaggaggccgccgaggaatcagacgacgacatgggattcggattatttgactag

SEQ ID NO: 5166 - DNA, 261 bp, Artificial Sequence
  Optimized genes for Saccharomyces cerevisiae
atgttaaatagatgcatatccaggaacactagactcccagtgaatctacgtatcgccagtcgattttactctgatggcccccttgggggagcagggcccggtaacccacaagatatttttattaagagagagagagccaaagaggattactatgctcgccaacaggaacgggagcagttggcccacgtaaaggaacaacttaaggaacataaaaagaagttagagaaccttgaaaacaagataaacaacctaagtaaatga

SEQ ID NO: 5167 - DNA, 546 bp, Artificial Sequence
  Optimized genes for Saccharomyces cerevisiae
atgggactttatgccagcaagttattttctaacttgttcgggaataaagagatgcgcatactgatggttggtctggatggggcaggcaaaactaccgtcctatataagcttaagctgggggaggtcattactacgatacctactatcggttttaacgtagagaccgtgcaatataagaatatttcctttacggtatgggacgttggaggccaggatcgcatccgctcgctatggcggcattattacaggaacactgagggtgttattttcgtcatcgacagcaatgacagatcccgtattggcgaagccagagaagtaatgcagcggatgctaaacgaagacgagttaaggaatgcagtgtggcttgtatttgcaaataagcaagatctaccagaagcgatgtcagcagccgaaatcaccgaaaagctcgggcttcattcaataaggaatcggccatggtttatacagtccacttgcgcgacgtctggagaagggttgtacgagggtcttgaatggctgtccaacaacctgaaaaaccaatcctag

SEQ ID NO: 5168 - DNA, 1287 bp, Artificial Sequence
  Optimized genes for Saccharomyces cerevisiae
atgaccgctgcaaaacctaacccatacgccgctaagccaggcgattacctcagcaacgttaataatttccagcttatcgattcgactctccgtgaaggggaacagttcgctaatgcatttttcgacaccgaaaaaaagattgagattgcaagggctctagatgactttggagttgactatattgagttgacctcccccgtcgcgagcgaacagagtcgtaaagattgcgaagcaatttgcaaacttgggcttaaggcaaaaattctaactcacatccggtgtcatatggatgatgccaaagtagccgtcgaaaccggagttgacggggtagacgttgtcataggaacgagcaaatttctgcggcaatattctcacggaaaagacatgaattatatagccaagagcgccgtggaggttatagaattcgtcaagagtaagggaattgaaatacgtttcagctccgaagattcctttcgatctgatcttgtcgatctattgaatatctacaagactgttgataagattggtgtgaacagagtcggcatcgccgacactgtcggctgtgctaatccacggcaagtttacgaactgatacgcaccctgaaaagcgtggtatcttgcgacattgaatgtcacttccacaacgacacaggttgtgcaattgccaacgcatacactgctttagaagggggggctagactgatagatgtatcggtgctagggatcggcgagcgtaacggtattacaccactaggtgggctcatggctcggatgatagtcgccgctcccgactacgtaaaaagtaagtacaagttgcacaagattcgtgacattgagaatttggtagcggatgcagtagaagtcaacatccccttcaataaccccataacgggtttctgtgcttttactcataaggcagggattcacgcaaaggccatactagccaacccctcaacttacgaaatactagacccgcacgacttcggcatgaagagatacatccattttgctaatagactaactggatggaatgcaataaaggctagggtcgatcagctgaacctcaatcttaccgacgaccaaattaaggaagtcacagctaagataaagaagcttggcgatgttcgttcccttaatatcgatgacgtggattcgataataaaaaacttccatgccgaggtgtcaaccccgcaagtcctttccgcaaagaaaaacaaaaagaatgattcagatgtgcctgaacttgctaccatccccgctgctaagcgaacgaaaccttccgcctag

SEQ ID NO: 5169 - DNA, 363 bp, Artificial Sequence
  Optimized genes for Saccharomyces cerevisiae
atggccggtgtaaaggcttacgagctccgtaccaaatcgaaagaacagcttgcgtcgcaattagtagacctaaagaaggaattagccgagttaaaggtacaaaagctatcaagaccaagtcttcccaagattaaaactgttcggaaatctatagcatgtgtactgactgtaataaatgaacagcaacgcgaagctgtgcggcaattatacaaaggaaagaaataccagcctaaagatttaagagcgaaaaagactcgtgcgttacgtcgcgcactaacaaagttcgaggcatcccaagtgaccgaaaagcagagaaagaagcaaatcgcgtttccgcaacgcaaatatgcgataaaagcctaa

SEQ ID NO: 5170 - DNA, 546 bp, Artificial Sequence
  Optimized genes for Saccharomyces cerevisiae
atgggtctgttcgcatctaaactattttcaaatctttttggaaataaagaaatgcggattctaatggttgggctggacggggctgggaaaacaactgtactgtacaaactaaaactaggagaagttatcactacgatccctacgattggcttcaatgtcgaaacagttcagtacaaaaacatcagctttacggtctgggatgttggcggacaagaccgcatccgctcgctctggcggcactactataggaacacggaaggtgtcatatttgttgtggactcgaatgaccgatcccgtattggtgaagcacgggaggtcatgcaacgtatgttaaatgaagatgaacttcgtaacgcggcctggctagtgtttgcgaataaacaagatcttccagaggccatgtccgccgcagagatcaccgaaaaacttggtttacatagcataaggaacagaccttggtttatccaggccacctgtgccacttctggtgagggattatatgagggtcttgagtggctttcgaattcgttaaagaactctacgtga

SEQ ID NO: 5171 - DNA, 471 bp, Artificial Sequence
  Optimized genes for Saccharomyces cerevisiae
atgggtaaggataacaaggaacacaaggaatcaaaggaatccaagacggtcgataactacgaggcgaggatgccggcagtgcttccttttgccaaaccgctcgcatcaaagaaactaaacaagaaggtattgaagactgtcaagaaagcgtcgaaagcaaaaaacgttaagaggggggtgaaggaggtagttaaggcactacgtaagggggagaaaggactcgttgtgatagcgggagacatttcaccagctgatgttatatcccatattcccgtgctttgcgaggatcattcagttccctatatttttatcccttcaaagcaagatctcggagcagctggagctactaagaggcctacctcagtagtgttcattgtacccggctcaaataagaaaaaggacgggaaaaacaaggaagaggagtataaggagagcttcaacgaagtggttaaagaagtgcaggcgttatag

SEQ ID NO: 5172 - DNA, 1089 bp, Artificial Sequence
  Optimized genes for Saccharomyces cerevisiae
atgtcacgcccgcaagttactgtacactcccttaccggggaagccacagcgaatgcattgccgcttcccgcagtcttctctgccccgatccgtccggatatcgttcacaccgtcttcacgtcggtgaacaagaataagcgacaagcatatgcagtaagcgaaaaggctgggcatcaaactagtgctgaatcatggggcaccggtcgcgcagtagcccgcataccgcgtgtgggtgggggcggcaccggtcggagtgggcaaggcgcgtttgggaatatgtgccggggcggacgtatgttcgcgcctacaaaaacgtggcgcaaatggaacgtgaaagttaaccataatgaaaagcgttatgcaaccgcatcagctattgccgcgactgccgtagccagtctggtcttagcccgtgggcaccgtgtggagaagattccggaaattccattggtggtcagcaccgacctagagtcgatccagaaaacaaaggaagcggtagctgcactaaaagcagttggtgcgcactcggacctgctcaaggttctaaaatcaaagaagctcagagcgggcaaggggaaatataggaaccgccgctggacacagagacgcgggccattagtagtgtacgcggaggataatggaattgtcaaagcccttcggaatgtgccgggggtagagactgcaaacgtggcctcacttaaccttttgcagctagcgcccggtgcacatctagggcgtttcgttatatggacagaggcggcgttcactaaacttgatcaggtttggggtagcgagacagttgcctcctcaaaggtaggttacaccctgcctagtcatatcatctctacgtccgatgtcacccgtataattaattcatcggaaatccagtccgctataaggccagctgggcaagctacgcagaaacgtacccacgtcttgaagaaaaatccgctaaagaataaacaggtgctgttgcgtttgaatccatatgcaaaggtattcgcagcggagaagctaggtagcaagaaagcggaaaaaacgggcaccaagcccgcagccgtatttgcggaaaccctaaagcacgactga

SEQ ID NO: 5173 - DNA, 597 bp, Artificial Sequence
  Optimized genes for Saccharomyces cerevisiae
atgccgagggtagcaatcatcatctatactctatatggccatgtggctgcgacggctgaagcggaaaagaaagggatcgaagcagccggtgggtctgcggatatataccaggtggaggaaactctctccccagaagtcgtgaaggcccttggtggggctccgaaacccgattacccaattgcaacccaagatacacttaccgagtatgatgcctttctattcggtatacccacaagattcggcaattttcccgctcaatggaaagcgttctgggataggacaggggggttatgggcaaagggggccttgcatgggaaggtcgcagggtgtttcgtcagtaccggaacgggtggggggaatgaggcaaccataatgaacagcctctcgacattggctcaccacggaattatcttcgtcccattaggatataaaaatgttttcgctgaactcacgaatatggacgaggttcatgggggctccccatggggggctggtaccattgcgggttccgacggatctagatctccttcggcgctagagttacaggtccacgaaatccaaggaaaaaccttttacgagacggtcgcgaaattctag

SEQ ID NO: 5174 - DNA, 963 bp, Artificial Sequence
  Optimized genes for Saccharomyces cerevisiae
atgtccaccttcgagactctgataaaacgtggtgggaatgaagcgattaaaataaacccacctacgggagccgatttccacatcacgagtcggggtagcgattggttttggacatgcttctgctgttatctactcttcgggctgattcttacttttctgatgtttcggaaaccggtaaatgatcgttttttctatctcaccgggatcgcaccgaacttcttcatgtgcatcgcctattttactatggcgagcaatctgggctggattccagtaaaagctaagtacaaccacgtgcaaacatcgacccaaaaggagcatccgggctatcgccaaatattttactcgcgctttgtgggctggtttctcgctctgccgtggcccatcatccaaatttgcatgctcgccggaactcctttttggcaaatggcgttcaacgtatgtattacggaattttttacagtctgctggttgatcgcagcctgcgtacattcgacttacaagtggggctattacaccatcggtttgggtgcggcaatagtagtaagtatctccgtcatgaccacctcgtataacttggtaaagcaacgggacaatgacattcgtctaaccttcctagtgttcttctcaatcataatgtttctgtggatcatcgcgtatccaacttgcttcgggatcacagatgggggaaatgtgctccagccagacagtgcaggaatattttacggaatcatcgacctgatcctcatgtgctttataccgacccttctggtcccgatagctaaccacttcggggctgacaaactcggttaccacttcggtccgtctgacgccgaagcagtcatggcaccgaaggcgcctgtcgccagcccaaggccagccgctacaccgaatttatccaaagataaaaagaaaaaaagtaaaaaatctaagaaatctaaaaaaagcaaaaagagtgaagaatga

SEQ ID NO: 5175 - DNA, 747 bp, Artificial Sequence
  Optimized genes for Saccharomyces cerevisiae
atggcacgaacctttttcgtgggaggaaatttcaaattaaacggctctaagcagtctattaaggaaatcgttgagcggctaaacaccgcaagcattccggaaaacgttgaggtggtgatttgcccgcccgcgacctatctcgactacagtgtgtctctagttaaaaagcctcaagttacagtgggggcacagaacgcctacctaaaggctagcggagcctttacaggtgaaaattccgtagaccaaattaaggacgttggagcaaagtgggtgatactaggccacagtgagcggaggtcatattttcacgaggatgataagtttatagctgataaaactaagttcgctctaggtcaaggggtcggggtgatactgtgtattggggaaactctagaggagaagaaagctgggaagacgctggatgtcgtggaacgccaactcaatgcagtgcttgaggaagtaaaggactggacgaatgttgtagtcgcttatgagccggtttgggcaataggtacagggctggctgccacaccagaagacgcacaagatattcacgcttccatccgaaagttcctagcaagtaaacttggagacaaagctgcctccgaacttaggatattgtatggagggagcgctaatggatctaatgccgttacgttcaaggataaggcagatgtcgacggttttttggtggggggcgctagtctgaaacctgaattcgttgacattataaactctcgaaattag

SEQ ID NO: 5176 - DNA, 456 bp, Artificial Sequence
  Optimized genes for Saccharomyces cerevisiae
atgggtcgcatgcacagtgcgggaaagggcattagctcctccgcgatcccttacagtcgcaatgcacctgcgtggttcaagctatcgagcgagtcagtaattgaacaaatagtgaagtacgcacggaaaggtttgactccgtcgcaaataggggtcttattgcgtgatgcacatggagttacgcaggcccgcgtgatcacgggcaataagattatgcgcatactcaaatcgaatggtctcgcacccgaaattcccgaagatctgtactacctgatcaaaaaggccgtaagcgttagaaaacaccttgagagaaacaggaaggataaagatgcaaagtttcgattaattttgatcgaatccaggattcatagactagcccgttattataggacagtagccgttctgccgccgaattggaagtatgaaagcgcaacagcgagcgccttggtcaattag

SEQ ID NO: 5177 - DNA, 1017 bp, Artificial Sequence
  Optimized genes for Saccharomyces cerevisiae
atgaagctgagcaccgttcttctttcagcggggttagcgtccacgacccttgcccagttttccaatagcacgagtgcgagctcgacggatgttacttcttcctccagtatctccacctctagcggttctgtcacaatcactagttccgaggccccagaatcggataacggtacaagtactgccgctcccaccgaaacatctacagaagcccctacaactgcgatccctacaaacggtacatctactgaggcgccaacaaccgcgatccctacgaatggtacgtcaaccgaggcaccgacggacacaaccacagaagcaccaacgaccgctcttcccactaatggtacttcaaccgaagcgccgaccgacaccaccacggaggctcccacaaccggtctacccacaaacggcacaacctcagcttttccacccacgaccagtttgcctccctcgaataccacgacgaccccaccatacaacccgagtaccgactataccactgattacaccgttgtcaccgaatacacgacttattgtcctgagcccacaacgtttaccaccaatggcaagacttatacagtaacggagcccacaacacttactataaccgactgtccatgcaccatcgagaaaccgaccacgacgagcacaacggagtatactgtagttactgaatatacgacctattgtccggaaccaaccactttcaccaccaacggaaaaacatataccgtcaccgaaccaacaaccctcactattacagactgtccgtgtaccatagaaaaatcagaggccccagaatcatccgtcccagttacggagtcaaaaggaacgacgactaaggaaactggcgtgactacaaaacaaaccacagctaacccaagccttactgtgtccacggtggtgccggtcagtagcagcgcttctagtcacagtgtggtcataaactcgaacggcgcgaacgtcgtggttccaggagctttgggcctcgcgggtgtagcgatgttattcctgtag

SEQ ID NO: 5178 - DNA, 489 bp, Artificial Sequence
  Optimized genes for Saccharomyces cerevisiae
atgagccaagtatatttcgatgtcgaagctgatggccagccaatcggtagagtagtatttaagttatataatgatattgtgcctaagacggcggagaatttccgtgccctgtgtacaggcgagaaaggattcggctacgccggatcaccatttcacagagtgatcccggactttatgttgcaggggggcgatttcaccgctggtaacggaaccgggggcaagtctatttacggcggcaagtttcctgatgaaaactttaagaagcaccatgatcgacctggattattgagcatggcgaacgccggcccgaatactaacggctcccaatttttcataacgaccgttccgtgcccttggcttgatggcaaacatgtggtgtttggagaggtcgtcgatggctatgacatagtaaagaaagtagagtcgctcggatcaccatcaggggcaaccaaagcgcgaatagtagtggcgaagtcgggcgaactgtaa

SEQ ID NO: 5179 - DNA, 648 bp, Artificial Sequence
  Optimized genes for Saccharomyces cerevisiae
atgtctcgagctaaacgcattatgaaggaaatacaagcggttaaggacgacccggcggcccacatcaccctcgagttcgtatcagaaagcgatattcaccatttgaaaggtacgtttctaggtcccccagggacaccgtacgaagggggcaaatttgttgttgacatcgaggtccctatggaatatcctttcaagccgcccaaaatgcagttcgacactaaggtgtatcaccctaatattagcagtgtaacgggtgctatttgcctcgatattcttaagaatgcatggtctccggtcatcacgcttaaatcagctctaatctccttgcaggccctacttcagtcccctgagcccaacgacccacaagatgctgaagtagctcagcactaccttcgggaccgcgagagtttcaacaaaacagcagccttatggacgcgtctatatgctagcgagacaagcaacggccaaaagggaaatgtagaggagtcagacctgtacggaatagaccacgatcttatagatgaattcgagtcgcagggttttgagaaggataaaatagtggaagtgctgcgaaggcttggagtaaagagcctggacccaaacgataacaacaccgcaaaccggatcatagaggagcttctcaaatga

SEQ ID NO: 5180 - DNA, 546 bp, Artificial Sequence
  Optimized genes for Saccharomyces cerevisiae
atgatgttacctcgcagcatgaagtttatgaccgggcgtaggatattccatactgcgacagtccgagcatttcaatctacggctaaaaagtccctgacaataccctttcttccagtgctacctcagaaaccaggcggtgttcggggtacccccaacgatgcatatgtaccacccccagagaataagttagaaggtagctaccattggtatatggagaaaatatttgcgcttagcgtcgttccccttgcaacaaccgctatgcttacaacggggccattgtctacagccgccgattcattcttttctgtgatgttacttgggtattgctatatggaattcaattcatgtataacggattacattagcgaacgcgtgtatggagtctggcacaaatacgctatgtatatgttaggattaggttctgctgtcagcctttttggtatttacaaactggagacggaaaatgatggagtagtaggcttggtaaaaagtttatgggatagttccgagaaagataactcccagaagatcgaagcgaagaaatga

SEQ ID NO: 5181 - DNA, 396 bp, Artificial Sequence
  Optimized genes for Saccharomyces cerevisiae
atgtcagcaaaggccgaaaaaaaaccagcctctaaggcaccagcagaaaaaaagcctgcggccaagaagaccagtacttcgacggacgggaagaaacgcagtaaagcacgtaaagagacgtattcctcgtatatctacaaagtgcttaaacaaacgcatccggatacgggtatatctcaaaagtccatgtccatcctaaattcgttcgtgaatgatatattcgaaagaattgctacggaagcttccaaactcgcggcgtacaataaaaagagtacaatatccgcacgtgagatccagaccgcagtccgcctgattctcccaggtgaacttgctaagcatgctgtaagtgaaggaacccgagccgtaactaagtacagctcttcaacacaagcgtga

SEQ ID NO: 5182 - DNA, 399 bp, Artificial Sequence
  Optimized genes for Saccharomyces cerevisiae
atgtcaggcggtaaaggaggcaaagctggcagtgcggctaaagcctctcaaagccggtccgctaaagctggcttaactttcccagtcggacgggtacatcgcctattacggcgagggaattacgcacaaaggattggatcaggtgcccctgtttatttaacagcagtattggagtacctggcggctgaaatcttggaactggccgggaacgccgcgagagacaacaaaaagacaaggattataccgcgtcacttacaactggctattaggaacgacgatgagcttaataaattactggggaatgtaacaatcgcacagggcggcgtgcttcccaatatacaccagaatcttcttcccaaaaaatcggcaaaggcgacaaaagcctcccaagagctatag

SEQ ID NO: 5183 - DNA, 669 bp, Artificial Sequence
  Optimized genes for Saccharomyces cerevisiae
atgtcttcctctgaatccatacgaatggtcttaattggtccccctggcgcgggcaaggggacgcaagcaccgaatctacaagaacgctttcatgccgcacacttagcgacaggggacatgttgcggtcacaaatagcgaaaggtactcagctcggtttagaggcaaaaaagattatggaccaaggcgggctagtctctgatgacattatggtcaacatgatcaaagacgaacttaccaataatccagcatgtaagaacggattcatcctcgatggctttccgcgtactataccccaagcggaaaagctcgaccaaatgctgaaggagcaaggcaccccacttgagaaagctattgagcttaaagtagatgacgagctcctagtcgcaaggattaccggccgtttaatacatcctgcgtccgggcgaagttaccataagatctttaatcctccaaaggaggacatgaaagatgatgtgactggcgaagctctagtccaaagatctgacgataacgccgacgctctaaaaaagcgactggcagcctaccatgcacagacagagccgatcgtcgacttctataaaaagacgggcatctgggcgggggttgatgcctcgcagccaccggcaacagtatgggcagacattttaaacaaactgggcaaggactaa

SEQ ID NO: 5184 - DNA, 888 bp, Artificial Sequence
  Optimized genes for Saccharomyces cerevisiae
atgtccgcttctgcccagcactcgcaagcccaacagcaacagcaacaaaagtcatgcaattgcgacctgctcctttggaggaatccagttcagaccggtaaatatttcggggggagcttacttgctttactgatcctgaagaaagtaaatttgataacattttttctcaaggtagcctacaccatcctttttaccaccggttctatagagttcgtgtccaaattattcctcgggcaggggcttatcacgaagtatggacctaaagaatgcccgaatattgcaggatttataaaaccacacatcgatgaggctttgaaacagcttccggtgtttcaagcccacattaggaaaaccgtatttgctcaagttcccaaacacactttcaaaactgcagtagcactttttttactacataaattcttttcttggtttagtatctggactattgtgttcgttgccgacatatttacattcacgttaccagtaatctatcacagttacaagcacgaaatcgatgccaccgtagcccaaggagtcgaaataagtaagcagaaaacacaagagtttagtcagatggcatgtgaaaaaactaagccctacttagacaaagtggaatcaaagctagggcctataagtaatctggtgaaaagcaaaaccgcgcctgtttcgtcgacggctggtcctcagactgcttcaaccagcaaacttgccgcagacgtgccactcgagccggagagcaaagcctatactagcagcgcacaggtcatgcctgaggtgccacaacatgaaccatcaacaacacaagaatttaacgtcgacgagctatcgaacgaattgaaaaaatcaacgaaaaatctacagaatgaattagaaaagaacaacgcatag

SEQ ID NO: 5185 - DNA, 168 bp, Artificial Sequence
  Optimized genes for Saccharomyces cerevisiae
atggacagcgcgaagataattaacataatactctctctgttcttgcctcctgtagcagtcttcctggctcggggttggggaacggactgtatcgtcgatatcatattgacaattctcgcgtggtttcctggtatgctttatgctttatatattgtactccaagattag

SEQ ID NO: 5186 - DNA, 291 bp, Artificial Sequence
  Optimized genes for Saccharomyces cerevisiae
atgtctaccgtgaacgtactgcggtactccgccttaggcttaggactcttttttggcttccgcaatgatatgatattgaaatgtaatgccaaaaagaaagaggaacaggcgcagtatgaagagaaactgaaacttgtggaagaggctaagaaggagtacgcaaagcttcatccggtagttacgccgaaggacgtaccagccaatgcatcgtttaaccttgaggatcccaatatagactttgaacgcgtgatactcaacgccgtagagtcacttaaggaggcttctacgtag

SEQ ID NO: 5187 - DNA, 1824 bp, Artificial Sequence
  Optimized genes for Saccharomyces cerevisiae
atggcctcgactgctaatatgatatcacaactaaaaaaactctccattgccgagcccgccgtggccaaagactcccatccggacgttaatatagtggacctcatgcgcaactacatctctcaggaactatccaaaattagcggggtcgattcatcccttatcttccctgccttggagtggactaatacgatggagcgcggcgatcttcttattcccattcctcgtctgagaatcaagggggcaaatcctaaggatcttgcagtccagtgggcagagaaattcccatgtggagattttctggaaaaggttgaagcgaacgggccgtttatacagtttttttttaatccccaatttcttgccaagttggttataccggacattttaacccggaaggaggattatggctcgtgcaaattggtagagaacaagaaagtaatcatcgaattctcaagccccaacattgcaaagccattccatgcaggtcatctaagatcgaccatcataggcggattcctcgcaaatttgtacgagaaactagggtgggaggttatccggatgaactatctaggagactggggtaaacaattcgggctcttggccgtgggcttcgagcggtatggtaatgaggaagccctcgtgaaggatccaatccatcacttgttcgatgtctacgttcggatcaacaaggacattgaagaagagggtgatagtatacctctggagcaatcaacaaatggcaaagccagagagtacttcaagcgcatggaagatggagacgaggaagctcttaagatctggaagcggttccgcgagttcagcatagaaaaatatatagatacatatgcgcgactaaatataaagtacgatgtttactcgggggaatcacaagtgagtaaggagtccatgctcaaagcaatcgatcttttcaaagaaaaagggctcacacacgaagataagggagcggtgctgattgacttaacaaagtttaataagaagctgggaaaagcgatagtgcagaaatcagacggaactacactgtacttgacacgtgacgtgggcgcagcaatggacagatatgaaaagtatcatttcgataaaatgatatacgttatcgccagtcagcaggacctacatgcggctcaattcttcgagatattgaaacaaatggggtttgagtgggctaaggacctacaacacgtcaactttggcatggtgcaaggcatgtcgactcggaaaggcacagtagttttcttagataacatactggaagagacgaaagagaaaatgcacgaggtgatgaagaagaacgaaaataaatacgcgcaaatcgaacatcccgaggaggtcgcggacttagtaggcatatcagccgtcatgattcaggatatgcaggggaagcgaatcaataattatgaatttaaatgggagcgcatgcttagctttgaaggagacactgggccatatctacagtatgctcactcgagattgcggtcggtcgaaaggaatgcaagcggcatcactcaagaaaaatggattaacgcagacttctcgcttttaaaggagcctgcagccaaattgttaatacggttgctcggccaatacccagacgtgcttcggaacgccattaaaacgcacgaacctacaacggtcgtcacttacttgttcaagctaacgcaccaggtgagtagttgctacgacgtgctttgggtagcaggccaaaccgaagagttggccacggcccgcctggcgttgtacggcgccgcgaggcaggtactttacaatgggatgaggctactcgggttaacgcctgtcgaaagaatgtaa

SEQ ID NO: 5188 - DNA, 1713 bp, Artificial Sequence
  Optimized genes for Saccharomyces cerevisiae
atgagtcaagacgccgcgattgctgaacaaacaccagtagagcacctatctgctgtcgattcggcttcacactccgtgttgtcaacgccctcaaataaagcggagagggatgagatcaaagcatatggtgaaggtgaagagcatgaaccggtggtagaaatcccaaagcgaccggccagcgcttatgtaacggtttctatcatgtgtataatgatcgcgttcggcgggttcgtatttggatgggatacaggtactataagcgggtttataaaccagacagactttataagacgcttcggaatgaaacataaagatggaactaattatctcagtaaagttcggacgggactgattgtatcgatcttcaatatcgggtgtgccataggcggaataatcttatctaagctaggggatatgtatgggcgaaaggtaggacttattgttgtagtagtgatctatattataggcattattattcaaatcgcctctattaataaatggtatcagtacttcataggtcgcattatcagcggactaggcgtcggcgggatagccgtactttccccaatgcttatatctgaggtttccccgaaacacttgcgaggaacattggtttcctgttatcaacttatgatcaccgcgggcatatttttggggtactgcacaaattttggcaccaagaactactcgaattctgtacagtggcgggtgccactgggactctgtttcgcttgggcgctttttatgataggcggaatgactttcgtcccggagtccccgcgctatctggcggaggttggcaagatcgaagaagcaaagagatcgatagctgtgtcgaataaagtggccgtcgacgatccaagcgtccttgcggaggttgaggctgttcttgctggtgttgaagctgagaaactagcgggaaacgcgtcatggggtgaattattctcgtcaaaaacgaaagtgctacagcgcctcatcatgggggcgatgattcaatctcttcaacagctcacaggtgacaactatttcttttactacggtaccacgatttttaaagccgttggcctctcagatagttttgaaacgagtattgttctcggcatagttaattttgcgagcacttttgtaggaatctatgtagtggagcgatacggccgccggacctgcttgttgtggggtgctgcttccatgactgcgtgcatggtcgtttatgcctcggtcggagtcactcgactctggccgaatggtcaggaccaaccctcatcaaagggtgccggtaactgcatgattgtatttgcttgtttttacatattctgtttcgccactacttgggcccccataccgtacgtagtcgtgtcagaaacttttcccctcagggttaaaagcaaggctatgtccattgctactgcagcgaattggctgtgggggtttctgattggcttcttcacgccgtttatcacaggggcgatcaatttttactatggctatgtatttatgggatgcttagtgttcatgttcttttacgtgctgctggtagtaccggagactaagggactgacgttggaagaggtaaacaccatgtgggaggaaggagttcttccgtggaagagtgctagttgggttcctccgtcacggcgcggagccaattatgatgcggaggagatgactcatgacgacaagcctctctataagagaatgttctcgacgaaataa

SEQ ID NO: 5189 - DNA, 1713 bp, Artificial Sequence
  Optimized genes for Saccharomyces cerevisiae
atgagtcaggatgctgcgatcgccgaacaaacgcctgtagagcatctatcagcagttgatagtgcctcccattcagtattaagcacgccgagtaacaaggccgaacgcgacgaaattaaggcgtacggcgagggggaagaacacgaaccggtggtggagatacctaaaagaccagctagcgcgtatgttacggtgtctattatgtgtatcatgattgcatttggcggattcgtctttggatgggacacgggcacgataagcggtttcataaatcaaacggatttcattaggcgcttcgggatgaagcataaggacggaactaattatttgagcaaggtacgtactggattgatcgtcagtatattcaacataggatgtgcaattgggggtattattctatcaaaattgggcgatatgtacggccgcaaagtggggcttatcgtagtggtcgtaatatacatcattgggattataattcaaatagcctcgatcaacaagtggtaccagtattttataggacgcataatttcgggcttgggtgtgggtggtattgccgttttaagccccatgttaatatccgaggtaagcccaaagcatcttcgcggaacattagtttcatgctatcaactgatgatcacagccggtatcttccttggatactgcacgaatttcgggaccaagaactattccaactctgtccagtggcgggtgcccctgggactatgctttgcttgggctctgtttatgatcggtggtatgacttttgttccagagtccccgaggtacctggccgaggtggggaaaattgaagaggctaagcgctccattgcagtttccaataaagtcgcggtagacgatccgtctgttcttgcagaagtggaagccgttctagccggtgtcgaggccgagaagctagctggaaacgctagctggggtgagcttttctcctcaaagactaaggtgttacagcgtctcatcatgggagcaatgatacagtccctacaacaattgacaggtgataattactttttctactatgggacaactatcttcaaagcagtaggactgtccgattcattcgagacgagtatagtactagggatagttaacttcgcgtcaacgttcgtaggaatctatgtcgttgaacgctacgggcgtcgaacatgtcttctgtggggagcggctagcatgacggcttgcatggtcgtttatgcctccgttggtgtgacccgactgtggcctaacggtcaggatcagccgtctagcaagggagctggcaactgcatgatagtttttgcttgtttctatattttctgttttgccacgacctgggcacccatcccgtatgttgtagtgagcgagaccttcccgttgagggtgaagtccaaagcgatgtccatagccacagcagcaaattggctctgggggttcttgatcggcttcttcaccccctttataacgggagccatcaatttttactacggttatgtctttatgggttgcttagtttttatgtttttctatgtacttctagtggttcccgaaacgaagggcctgaccctggaggaagtaaatactatgtgggaggaaggggtcctgccctggaaatccgccagctgggtccctccttcgaggcgaggagcaaactacgatgccgaagagatggcccatgacgataaacccctctacaagaggatgttctctacaaagtga

SEQ ID NO: 5190 - DNA, 333 bp, Artificial Sequence
  Optimized genes for Saccharomyces cerevisiae
atgaaatatcttgcggcgtatctattgctggtccaaggtggtaacgccgctccctccgcggccgatattaaagctgttgttgaatcggtaggcgccgaagtcgacgaggcccgaattaatgagttattgtcttctttagagggaaaagggtctttagaagaaataattgctgaggggcaaaaaaaatttgccacagttccgacaggtggggcgagcagtgcggctgctggagcggccggggccgcagcgggaggcgatgccgccgaagaggaaaaagaggaagaggctaaggaagaatccgatgatgacatgggattcggacttttcgactag

SEQ ID NO: 5191 - DNA, 498 bp, Artificial Sequence
  Optimized genes for Saccharomyces cerevisiae
atgccccccaaatttgacccaaacgaagtcaagtacctgtatctgcgggccgtcggtggtgaggtaggggcgtcagccgcactcgcgcccaaaattgggccattgggtctttctccgaaaaaggtaggggaagacattgcaaaagctacaaaggagtttaaggggatcaaggttacggtgcaactcaaaatccaaaatcgacaagccgcagcatcagtggtcccgtctgcaagttctctagtcatcacagccctcaaggagccgcccagagatcgtaagaaggacaagaatgttaaacatagtggcaatatacagctggacgaaataattgagatcgccagacaaatgcgtgataaatcctttggccggacattagcttcagtcactaaggagatactcggaacagcgcagtcggttgggtgtagagtcgatttcaaaaacccgcacgatattattgaaggcatcaatgcgggcgaaatagaaattccagaaaactaa

SEQ ID NO: 5192 - DNA, 564 bp, Artificial Sequence
  Optimized genes for Saccharomyces cerevisiae
atgtcgcgcccaatagtcatcagtggaccatccggcacaggaaagagcacacttctgaagaagctttttgccgaataccctgactcgtttggattcagcgtctcttccacaacccggacaccgcgcgccggtgaggtgaacggcaaagattacaacttcgtgtcggtcgacgaatttaaatcgatgattaagaacaatgagttcattgagtgggcacaattttctggcaactattacggtagcacagtggctagtgtcaagcaggtgagcaagtccggcaagacttgcatactagacattgatatgcaaggagtaaagtcggtcaaagcaattcctgagctgaatgctcgattcctgttcatcgctcctccttcagtcgaagacctgaaaaaacgcttagaaggacgtggaacggaaaccgaagagtcgattaataaacggctgtcagctgcccaggcagaacttgcctacgcagagacaggtgcgcatgacaaagtcatcgtgaacgatgatctggataaagcctacaaagaattaaaggattttatatttgccgaaaaatag

SEQ ID NO: 5193 - DNA, 411 bp, Artificial Sequence
  Optimized genes for Saccharomyces cerevisiae
atggccaaatttttaaaagccggaaaggttgcggttgtggttcgtggcagatacgcgggtaagaaagttgtcattgttaaaccgcacgacgaaggaagcaagtcacacccctttggccatgccttagtcgcgggtatagaaaggtatccctctaaggtgaccaaaaaacacggtgccaaaaaagttgccaagaggactaagatcaaaccattcataaaggtcgtcaactataatcatctgttgcctactcgttacacgcttgacgttgaggcctttaagtctgtggtgtctaccgaaaccttcgagcaaccttcacagcgcgaagaagcgaaaaaagtcgtcaaaaaggctttcgaggagcggcatcaggccgggaagaaccagtggtttttcagcaagttacggttttaa

SEQ ID NO: 5194 - DNA, 1755 bp, Artificial Sequence
  Optimized genes for Saccharomyces cerevisiae
atgggaattcacatcccgtacctcaccagcaaaactagtcaatcgaatgtgggcgacgctgtggggaatgctgatagcgtcgagtttaactcagagcatgatagcccctccaagagagggaaaattacgctagaatctcatgagatacaacgagccccggcttcagatgatgaggaccgcattcaaattaaacccgtaaatgacgaagacgacacgtctgttatgataacgtttaaccaatcattatccccatttatcattacgttaactttcgtcgcttcaattagtgggttcatgttcggttacgatacaggttacattagctcggcactgataagtatcggcacagatctagaccataaagttttgacctatggggaaaaagaaattgtcacggctgccacgtcgcttggggcattgattaccagcatatttgcagggacagctgctgacatctttggccgaaaaaggtgtctcatgggctccaaccttatgttcgtcatcggagcgattcttcaagtaagcgcgcatacgttttggcagatggccgtcggccgtctcataatgggatttggcgttgggatcggtagtttgatcgcaccgttgttcatatcggaaattgccccaaagatgatacggggtcggctcacagtgatcaattctctttggctcactggcgggcagttggttgcctatggttgtggcgcaggcctcaattatgtaaacaacggctggcggattttggtgggattgtcattaatacccaccgccgtgcagtttacttgtctttgttttctgccagatactccgcgatattatgtcatgaagggcgatttggctagagctacagaggtactaaagagatcttacacagacacatctgaggaaattatagaaaggaaggtagaggagctggtaacgcttaatcaaagtatacccgggaaaaacgtgcctgagaaagtgtggaacacgattaaagaactacacactgttccatcaaaccttcgtgccttgataattggttgtggattacaagcaatccaacagttcacaggatggaattccttaatgtacttctctgggaccattttcgagacggtgggattcaaaaactcctccgcagtctcaatcattgttagtgggacaaactttatatttactttagttgccttcttttcgattgataaaataggccgccgcacaatcttgctcattggactaccggggatgacgatggctcttgtcgtgtgctctatcgcatttcactttttaggaatcaagtttgacggagcagtcgcggttgtggtatcgtctggcttttccagctggggtattgtaatcatagtgtttataattgtattcgctgccttttacgctctaggtataggcacggttccttggcaacaatccgagctatttccgcaaaacgttcggggaataggcacatcatacgcgacggcaaccaactgggcgggatcattagtcattgcgtcaacattcttaacaatgctccaaaacataacacctgcaggtactttcgccttttttgcgggactttcgtgtctgtcgacgatcttctgctacttctgttatcccgaactttccggtttggaactcgaagaggttcagactatactgaaggacggatttaacatcaaggcatccaaggccctagcaaaaaaaaggaaacagcaggttgcgcgcgtccatgaacttaagtatgaacccacccaagagattattgaagatatctga

SEQ ID NO: 5195 - DNA, 267 bp, Artificial Sequence
  Optimized genes for Saccharomyces cerevisiae
atgggaaaggggacaccttcattcggcaaaagacataacaagtctcacaccctttgtaatcgttgtggacgtcggagtttccatgtccaaaaaaagacatgtagcagttgcggatacccgtcggctaaaacgcgatctcacaattgggctgcgaaggcaaagcgtaggcataccaccggaacgggtaggatgcgttatcttaagcacgtctctcgccgtttcaagaatggattccagacaggatccgcgaaagctacgtcggcctag

SEQ ID NO: 5196 - DNA, 384 bp, Artificial Sequence
  Optimized genes for Saccharomyces cerevisiae
atgcctcaatccttcacctcgatagcccggataggggattacattttgaagtcccccgtgttatcaaagctctgtgtcccagttgcgaatcaattcattaatttggctggatataagaaattaggtctaaagtttgatgacttaatagcagaagaaaatccaattatgcagacggcgcttagaaggttaccggaagatgaatcgtatgcgcgcgcctatcgtataatacgggcgcaccagaccgagcttactcaccatctattaccacgtaatgagtggatcaaggcgcaagaggacgtcccgtacctcttaccgtacatcctcgaggccgaggcggcggctaaagagaaagacgaactcgataacattgaagtatcaaaatag

SEQ ID NO: 5197 - DNA, 846 bp, Artificial Sequence
  Optimized genes for Saccharomyces cerevisiae
atgtcggagtatcagccttctctgttcgctttaaatccgatgggcttctcccctctagacggtagtaaatcgacaaacgaaaatgtgagcgcctccacgtctacagccaagccaatggtgggccaactcatctttgataaattcattaagaccgaagaggacccgataataaagcaagacactccttcaaatcttgactttgatttcgctcttcctcagaccgcaaccgcccccgacgccaagacggtacttccgattcctgagctggacgacgctgttgtagagtcattcttttcatcctcaactgatagtacaccgatgttcgagtatgaaaacctggaggataactcaaaagagtggacctcattatttgataatgacattcccgttacaacagacgatgtgtctttggccgacaaagctatagaaagcacagaggaagtaagccttgttcctagtaatctggaggtatccaccacttcgtttctaccgacccctgtcctcgaagacgctaaattgactcaaaccaggaaggtaaagaaacccaattcggttgtgaagaagtcacatcatgtgggaaaggatgacgagagtcgtctggaccatctgggtgtagtcgcctataacaggaaacaaagaagcattcccctgtcacccatcgttccagagtcctctgatccagcggcattaaaaagggcccgcaataccgaggcggcgaggcgcagccgggctcgtaaacttcaaagaatgaagcaactggaggacaaggtggaagagttgctgtcgaaaaattatcatctagagaacgaagtggctcgtttgaaaaagctggttggtgaacgatag

SEQ ID NO: 5198 - DNA, 132 bp, Artificial Sequence
  Optimized genes for Saccharomyces cerevisiae
atgctcatgagcaccttgccaggtggagttattctggtctttatattagttggactagcttgcattgccattatatcaacaataatataccgtaaatggcaggcacgccagcgaggactacaacggttctga

SEQ ID NO: 5199 - DNA, 648 bp, Artificial Sequence
  Optimized genes for Saccharomyces cerevisiae
atgttggggattcgaagtagcgtcaaaacctgttttaagccaatgtctttgacgtcaaagaggttaatatcgcaatcgctcctagctagtaagagcacttacagaacgcctaactttgatgacgttctcaaggaaaacaatgacgccgacaaaggtaggtcttatgcatacttcatggtcggtgcaatgggtctgctatcttcagcgggggcgaaaagcacggttgaaacctttattagctctatgacagccacagccgatgtactcgctatggcgaaggtggaggtaaacttggctgcaataccgcttggtaagaatgttgttgtgaaatggcaggggaaacctgtttttataaggcaccggacacctcatgaaatccaggaggcaaactctgtggacatgtccgcccttaaggacccccagaccgacgccgacagagttaaagatccccaatggcttattatgttgggtatctgcacacatctaggatgtgtaccgatcggtgaagcgggggatttcggaggatggttctgtccctgtcacggttctcattatgatatctccggacgtattcgcaagggacccgcacctctaaatctagagataccagcctatgaattcgacggtgataaggtaatagtcggctaa

SEQ ID NO: 5200 - DNA, 483 bp, Artificial Sequence
  Optimized genes for Saccharomyces cerevisiae
atgacagaattgtgtccagtttatgcaccattttttggcgcgataggatgtgcatcggccatcatattcacgtctttaggtgctgcgtatggtaccgcgaaatctggtgttgggatctgtgcgacatgcgtgcttagacccgacctcttattcaagaacatcgttcctgtaataatggcggggatcatcgcgatttacggattggtcgtttcagtgctcgtttgctacagtctcggacagaaacaggcgttatatacgggatttatccagctaggtgctggtttgtcggttggcctctcaggtctcgcggccggttttgcgattggaatcgtgggagatgcgggggttcgtggatcctctcaacagcctcggctttttgttgggatgatacttatactaatcttcgctgaggtattgggactgtacgggctcatcgttgccttattattaaatagcagagcaacgcaggatgtagtctgttaa

SEQ ID NO: 5201 - DNA, 474 bp, Artificial Sequence
  Optimized genes for Saccharomyces cerevisiae
atgtcggacgaagaacatacttttgaaactgccgacgccggcagcagtgctacctatccgatgcagtgctcggccttgcggaagaatggtttcgtcgtcattaaatcccgtccatgcaagatcgtcgacatgagtacatccaaaacaggcaaacatggccacgcaaaggtacatctggttgccattgatatatttacggggaagaaactggaagacttgagcccaagtacgcataatatggaggtacctgtggttaagcgtaatgaatatcagttactcgacattgatgacgggttccttagtcttatgaatatggacggtgatactaaagacgatgtcaaggccccggagggggaactgggagactcgctgcaaacggcgtttgatgaggggaaggacctgatggtgactattattagtgcgatgggggaggaggctgccatcagctttaaagaagccgctcgcacagactga

SEQ ID NO: 5202 - DNA, 498 bp, Artificial Sequence
  Optimized genes for Saccharomyces cerevisiae
atgccgccgaaattcgacccgaatgaggtcaaatacctgtacttaagggccgtgggaggtgaggtaggtgcctctgctgctctggcgccaaaaataggacccttgggcctttcgcctaaaaaagtaggtgaggatatcgccaaggcgactaaagaattcaaggggattaaggttacagttcaattaaaaatccagaaccgtcaagccgcagcttctgttgttccctctgccagctcgttggtcattacagcgcttaaggagccgccgcgagatcgaaagaaggacaagaatgtgaagcattcggggaacattcagctcgacgagataattgagatagccaggcagatgagagacaagagcttcgggcgcacattagcttcagttactaaagagatattggggacggcacagtcagttggttgtagagtcgattttaagaatccgcatgatataatagagggtataaacgccggcgagattgaaattccagagaattaa

SEQ ID NO: 5203 - DNA, 765 bp, Artificial Sequence
  Optimized genes for Saccharomyces cerevisiae
atggcctacacgaaaattgctctttttgctgctatagctgccctagcatccgcacagacccaagatcaaataaacgaactcaacgtaattcttaatgatgtaaagagtcatctccaggagtatatcagcctggcttccgattcctcctccggcttctccctgtcgtctatgcctgccggcgtgcttgacattggaatggcactagcctcggctacagacgatagttacaccacactatattcggaagtcgattttgctggcgttagtaaaatgctcaccatggttccgtggtacagtagccgtctggagccggccttaaaatccctaaacggggatgcgagcagctcagcagcaccgagttcaagcgccgccccaactagtagtgcggcgccatcgtcttctgcagctcccacatcaagcgcggcaagtagttcttctgaggcgaaaagttcaagtgcagctccttcgtccagcgaggcaaaaagtagttctgctgctccgtctagtagtgaggctaagtcttctagtgcggctcctagctctagtgaggccaaatcatcctctgctgccccttcatccactgaggcaaaaatcacctcggctgccccgtcaagtacaggtgcaaagacttccgcgatttctcagataactgacgggcagatccaagcaacaaaggcggtttctgagcaaactgaaaacggagcggcaaaggcttttgtgggcatgggtgctggggttgtagccgcggcggctatgctattgtga

SEQ ID NO: 5204 - DNA, 366 bp, Artificial Sequence
  Optimized genes for Saccharomyces cerevisiae
atggcacaacgtgttaccttccgtcgcaggaacccctacaacactcgtagtaataagataaaagtggtgaaaacgccgggcggcatactgcgagcacagcacgtgaaaaaattagccactcgtccaaagtgtggcgattgtggatcggctctccaaggcatttctacgctgagaccccgacagtacgcaacagtctcaaaaacgcacaaaacggtcagtcgggcctatgggggatcaaggtgcgctaattgcgtaaaggaaagaattatacgcgctttccttatcgaagagcagaaaatcgtaaagaaggtggttaaagagcaaacagaagccgcaaagaaatcagaaaaaaaagctaaaaaatag

SEQ ID NO: 5205 - DNA, 408 bp, Artificial Sequence
  Optimized genes for Saccharomyces cerevisiae
atgagcgatgcagtcacaatcaggacgcgaaaggttatatccaatccactgctcgcgagaaagcagtttgtcgtagacgtgttgcaccccaacagggctaatgtgtccaaagacgagctacgtgagaagttggccgaggtatacaaggcagagaaggacgccgtgagcgtgtttggattccgcacccagttcggaggtggaaaaagcgttggttttggtctggtctacaattccgtagcggaggccaaaaaattcgaaccgacctataggctggttaggtatgggctggcagaaaaggtcgaaaaggcttctcgccaacaaagaaaacagaaaaagaacagggataagaaaatatttggcacaggaaagcgccttgcgaagaaggtcgcccgacgtaatgctgactag

SEQ ID NO: 5206 - DNA, 2304 bp, Artificial Sequence
  Optimized genes for Saccharomyces cerevisiae
atggtccaaagcgccgtacttggttttccgaggatcgggccaaacagagagctcaagaaagcgacagagggatactggaacggcaagattacggtagacgagttgtttaaggttggcaaagacttacggacgcaaaactggaagctccagaaagaggccggcgtggatattatcccgagtaatgattttagcttctatgatcaagtgctggacctcagtttactctttaacgtcattcctgatcggtacaccaagtatgacctatcccctatcgataccctattcgcaatgggccgaggactccagcggaaagccacagagacggagaaagctgtggacgtgaccgctcttgaaatggtgaagtggttcgattcaaactatcactacgtccgacccacattctcaaaaaccacccagttcaaattgaatggacagaagccagtggacgagtttctcgaggccaaagaactaggcattcacacgcgacccgtgttattgggtccggtcagctacctattcctgggcaaggccgacaaagattcattggatctcgaaccgctaagcttactggagcaactattacctttgtatacagaaatactttcgaagcttgcctcggccggtgcaacagaagtccaaatagacgaacctgtactggtgctagatctccccgcaaatgctcaagctgctataaaaaaggcctacacgtatttcggggaacagtccaatctaccgaaaattaccttggcaacgtacttcggaactgtcgtaccgaatctcgatgctattaaaggtttaccggttgctgcgttgcatgtcgattttgtaagagccccagagcaatttgatgaggtagtagccgcgatcggcaacaagcaaactctcagtgttggcattgtcgacgggaggaacatatggaaaaatgacttcaaaaaatcgagtgcgattgtgaataaagcaattgaaaagttgggcgcagaccgtgtcgttgtcgctacaagttcaagtctattgcatacgccagttgatctaaacaacgaaactaagctggatgcagaaataaaggggttctttagctttgcaacccagaaacttgacgaagtcgtagttataacgaaaaacgtgtctggtcaagacgtggccgcagctcttgaagctaatgctaaatccgtggagtcgcgaggtaagagtaaatttatccacgatgctgcggtcaaagcgcgggtggcttctatagatgaaaagatgtccacaagggcggccccttttgaacagcgcttgcctgaacagcagaaggtgttcaacctccctctcttccctacgacaacaattggctctttcccacagactaaagatatcaggattaaccgcaataaattcaataaggggacaattagcgcggaagaatatgaaaagttcattaattcagaaatcgaaaaagttatccgattccaagaagaaatagggcttgatgtactcgtacacggggaaccggagaggaatgacatggtccaatactttggcgaacaaataaacggttacgcctttacagtcaacggttgggttcagagctacggctctaggtacgtaaggccgcccataatcgtgggtgatcttagccgacccaaggcgatgagcgtcaaagagtctgtttacgcgcaatccataacaagtaagcccgtaaaggggatgttgactggaccgattacttgtcttcgctggagtttcccgcgggacgatgtagatcagaagacgcaggccatgcaactagcgcttgccctgcgagatgaagtaaatgatctagaagctgcggggatcaaggtcatacaggtcgatgaacctgcgctaagggagggccttccattacgggagggaacagaacggtccgcgtactatacttgggctgccgaagcgttccgtgtggctacatcaggggtggcaaacaaaactcaaattcattcccacttctgctactcagacttggatccaaatcacattaaggcccttgacgcagatgttgtcagcattgaattttcaaagaaagacgatgctaattacatagccgaatttaagaattatccaaaccacataggtttgggactttttgacatccattcaccccgtattccttccaaagatgagttcattgcaaaaatatctaccatattaaagtcatacccggccgaaaaattttgggtgaatcctgattgcggcctaaagactcgtggttgggaggaaactcggttgagtctgacccacatggtagaggcagcaaaatattttcgggagcaatacaaaaattaa

SEQ ID NO: 5207 - DNA, 618 bp, Artificial Sequence
  Optimized genes for Saccharomyces cerevisiae
atgtctgatcctagttcaatcaatggcggaattgttgtcgccatgacgggcaaagactgcgtggccatagcctgtgacttacggcttggatctcagagccttggagtgtccaataagtttgaaaaaatttttcattacggacatgtcttcctaggaataacgggtctggccaccgacgtaactacgctgaacgaaatgttcagatacaagactaacctttataaactgaaggaagaaagggcgattgaacccgaaaccttcacacagctggtgtcctcaagcctctatgagcgccgttttggcccttactttgttgggcctgtggtggcgggaatcaattccaagagcggcaaaccgtttattgccggctttgacttgattgggtgtattgatgaggccaaggattttattgtatctggcaccgcatcagatcagttgtttgggatgtgtgagagcctgtacgaaccgaacctggagccggaagatctgttcgaaacgatatcacaagcactcttgaacgccgctgatcgagacgccttatcaggttggggtgcggtagtttacataataaagaaagatgaagtcgtcaaacgatatctgaaaatgcgtcaggattaa

SEQ ID NO: 5208 - DNA, 804 bp, Artificial Sequence
  Optimized genes for Saccharomyces cerevisiae
atgagcactagtcgagaggattctgtatacctagccaagctggcagagcaggctgaacggtatgaagagatggtggaaaatatgaagactgttgcaagttccggacaggagcttagcgttgaagaaaggaacttgttgtctgttgcgtacaagaacgtaataggcgctcggcgagcctcgtggagaattgtgtcgagtatagaacaaaaggaagagagcaaggaaaaaagtgagcatcaggttgaattaatttgcagttatcgatcaaagattgagacggagttaactaaaatctccgacgacatcttatccgttcttgatagccatttgataccgtcagcgacgacgggcgaatcgaaggtattctactacaaaatgaaaggtgactatcatcgttatttggccgaattctcatccggagacgcgagggagaaggccacgaatgcgagtttagaagcatataaaacagcttccgaaattgccactaccgaactgcccccgacacatcctattagactaggccttgctcttaattttagtgtattctattatgagattcaaaactcccctgacaaggcttgtcacctggcgaaacaggcttttgatgacgcgatagcagagctggacacactcagcgaggagtcgtataaggattccacactaatcatgcagcttctgcgtgataatttgacactgtggacgagtgacatgtccgagtctggccaagctgaagatcaacagcagcagcaacagcatcaacagcaacagccccctgccgctgccgaaggagaagcgcccaaatga

SEQ ID NO: 5209 - DNA, 330 bp, Artificial Sequence
  Optimized genes for Saccharomyces cerevisiae
atgtccgatgctggccggaaagggtttggggagaaggccagcgaagcactcaagccagatagtcagaagtcatatgccgaacagggtaaggaatacattacagataaggccgataaagtggcggggaaagtgcaacccgaagataacaagggggtctttcaaggtgtccacgactctgctgaaaagggtaaggataacgcagaaggccagggcgagtcacttgcggatcaggcgagagattacatgggagccgcaaagtcgaagctcaacgacgctgtagagtatgtttcggggcgtgttcacggcgaggaggatccaacgaagaaataa

SEQ ID NO: 5210 - DNA, 621 bp, Artificial Sequence
  Optimized genes for Saccharomyces cerevisiae
atgaacagcgaatacgactatcttttcaaacttctgcttattgggaactcgggggtcggcaaaagttgtctactacttcggtttagcgacgatacatatactaacgattatatatcgactataggcgtggacttcaaaataaagactgtagaactagacggtaaaactgtcaaactgcaaatctgggacacggcagggcaggagcgtttccgaaccataaccagctcttattaccgaggtagtcatggtataatcatcgtctacgatgttaccgaccaagagtccttcaatggtgtgaaaatgtggctccaggaaatcgatagatacgcaacgtctacagtgctcaaactgctagttggtaacaagtgcgatctaaaagataagcgtgtagttgaatacgatgtagccaaagaatttgcagatgccaataaaatgccgtttttagagacttccgctctggatagtaccaatgtagaggatgccttcctcactatggctaggcaaataaaagagtccatgtcacagcagaatctaaatgagactactcaaaagaaggaggataaaggtaacgttaatttaaagggtcagtcgttgacgaatacgggcggaggttgttgttaa

SEQ ID NO: 5211 - DNA, 1128 bp, Artificial Sequence
  Optimized genes for Saccharomyces cerevisiae
atggactccgaagttgcggcgttagtcatcgacaacggttcgggtatgtgtaaggcggggtttgcaggtgacgatgctcccagagcagtttttccatccatagtcggccgcccccggcatcagggcatcatggtggggatgggtcaaaaagacagttatgtcggtgacgaggctcaatctaagcgaggaatcctaacgttacgttaccccattgaacacggtatagttacgaattgggatgatatggaaaagatttggcatcatactttctataatgagctacgcgtagctccagaagaacatccagtactactcacggaagctccgatgaaccctaaatctaaccgtgagaaaatgactcaaatcatgttcgagacgttcaacgttcctgcgttctatgtaagcatccaagcagtgctttctctgtactcgtcggggcgaacaaccggaattgttttggactctggggacggagtaactcatgtcgttcctatctacgctggcttctctctccctcatgcaattttgagaatcgatctcgccggtcgggatctgacagattatttgatgaagatccttagcgaacggggctattcgttctccacgacagccgagcgagagattgttcgtgatatcaaggaaaagttatgctatgttgctttagatttcgagcaagagatgcagacggccgcacaatcgtcttctatagagaagtcatatgaactcccggatggtcaagtgatcaccattggtaatgagagattccgagctccggaagcccttttccacccatctgtattgggactggagagtgcagggatagatcagaccacatacaacagcataatgaaatgtgatgttgatgttcgtaaagagttatacgggaacattgtgatgtctggggggaccacaatgtttcccgggattgcggagaggatgcaaaaagagataacagctctagcgccaagctccatgaaggtgaaaattatagcgccacccgagcgtaagtattcagtctggataggcgggtcaatcctagcatctcttacgacgtttcagcaaatgtggatctcgaagcaggagtatgatgaaagtggacctagtatagtgcatcataagtgcttctaa

SEQ ID NO: 5212 - DNA, 765 bp, Artificial Sequence
  Optimized genes for Saccharomyces cerevisiae
atgagtattgccgagtttgcttacaaggaaaagcccgagacgttggtcctgtttgatgtcgacggaactctgactccggcgcggttaacggtctcggaggaggttcgcaaaaccctggctaaattgaggaacaaatgctgcattggatttgtggggggaagtgatctttcgaaacaactagagcaacttggcccaaatgttctggacgagttcgactactcgttctcggagaatggtctcaccgcctatcggctaggtaaagaattagcctcgcaaagcttcataaattggctcggagaagagaaatataataaactggcggtctttattctgcggtacctttcagagatcgacctaccaaaacgtcggggaacttttctcgagtttcgcaatggaatgatcaacgtttctccaataggtagaaatgcttcgactgaggaaaggaatgaatttgaaaggtacgataaggagcatcagatacgtgccaagtttgtcgaggccctcaagaaggagttcccagattacggtctcacgttttcgataggtggacagatctcgttcgatgtctttccggcaggttgggacaagacttactgtttacagcacgtagagaaggacggcttcaaggaaatacatttctttggcgataaaacaatggtaggggggaacgattacgagattttcgttgacgaacgcaccataggccactctgtacagtcacctgatgatactgtaaaaatattaactgaattattcaacctgtaa

SEQ ID NO: 5213 - DNA, 765 bp, Artificial Sequence
  Optimized genes for Saccharomyces cerevisiae
atggggcgcgtgataagaaatcaaagaaagggagctgggtccatattcacttcacacacgcgactccgacagggcgcagcaaagctgagaaccttggactacgcggagcgtcacgggtatatacgaggaatagttaagcagatagtgcatgattccggccggggtgcccctttagccaaggtcgtctttcgtgacccatataagtatcgacttagggaggagatctttatcgctaatgagggtgtgcacactggtcaattcatttatgctggcaagaaagcctctttgaacgttggaaatgtgctgccactgggaagtgtacctgagggcaccatcgtaagtaatgtcgaggaaaaaccaggagaccgaggcgctctagccagagcgtctggaaactatgtaattattattgggcataacccggatgaaaataaaacacgtgttcggcttcccagtggggcgaagaaggtcatatcctctgacgcaagaggagtgattggagtcattgcaggtggcggacgagttgacaaaccactcctcaaagcgggtagggctttccataagtatagattaaagagaaactcttggccgaaaacccgtggtgtcgcgatgaacccagtagatcacccccatggtggggggaaccaccagcacataggcaaggcctcaacgatttcaaggggagcagtgagcgggcagaaagcgggcttaatagcagcccggcgcacaggtctgctgcgcggtagccagaaaacacaggattag

SEQ ID NO: 5214 - DNA, 180 bp, Artificial Sequence
  Optimized genes for Saccharomyces cerevisiae
atggcgaagtcgaaaaaccacaccgcacacaaccaaacgcggaaagcgcaccgcaatggcattaagaaacctaaaacatataagtacccgtcgttaaagggagttgatcccaaatttagaagaaaccacaaacatgcgctacatggcaccgctaaagctctagctgcagcgaaaaaataa

SEQ ID NO: 5215 - DNA, 1458 bp, Artificial Sequence
  Optimized genes for Saccharomyces cerevisiae
atggtccatcttggccctaaaaagccacaggcccgcaaggggagcatggccgatgtccccaaggaactaatggacgagatccatcaacttgaggatatgttcactgtcgactctgaaacattgcgcaaagtagtaaagcacttcatagatgagctcaataagggcctaaccaaaaaggggggaaacatcccaatgatccctggttgggtcatggagttcccaactggtaaggaatccggcaattaccttgcaattgacttgggcggaaccaaccttcgcgtcgtcctagtcaagctcagcggtaaccacacgttcgatactacgcaatctaagtacaaattgccgcacgacatgagaacaaccaaacatcaagaagagctttggagtttcattgctgattcattgaaggatttcatggtggaacaagaactcttaaatactaaggatacgctcccgctgggatttaccttttcttaccccgcttctcaaaacaaaatcaacgaagggatactacaaaggtggaccaaaggttttgatataccgaatgtagaaggacatgatgtagtaccattgcttcaaaatgagatcagcaagagggagctcccaatagagattgtggccttaattaatgatacagtcgggacactaatcgcctcctactataccgacccagaaaccaaaatgggcgtgatattcggtaccggtgtgaatggtgctttttacgatgtagtatctgacatagagaagcttgagggaaagttagctgacgacattccatccaactctccgatggctatcaactgtgaatatgggagttttgacaacgaacatctggtgctccctcggacgaaatacgacgtcgctgttgacgaacagagcccgcgacccggacaacaagcctttgaaaagatgactagtgggtattatctgggggaacttttgcgactcgtgcttttggaactgaacgagaaaggcttgatgctaaaggaccaagaccttagtaagttaaaacaaccttatataatggatacttcgtaccctgcccggatcgaagatgatccatttgaaaacctagaggacacggacgacatctttcagaaggacttcggggtgaaaacgaccctgccggagagaaaattaatcagacgactatgcgaattgatcggtacaagagcagcgcgcctagctgtgtgcggaatcgcggccatctgccagaaacgaggctataagaccggtcatatagcggcagatgggagtgtatacaataaataccctggattcaaggaggcggcagcgaaggggttaagggatatttacggctggaccggcgacgcaagcaaggatcccatcacaatcgtaccagcagaggacggtagcggtgccggggccgccgtgatagccgcgttgagtgagaagcgcatagccgagggaaaaagtttggggatcattggagcatag

SEQ ID NO: 5216 - DNA, 2757 bp, Artificial Sequence
  Optimized genes for Saccharomyces cerevisiae
atgaccgatacatcatcctcgtcgagcagcagcagtgcatcatcggtttctgcacaccaaccgacccaggaaaagccagcaaagacctacgatgacgcagcaagtgagtcgtcggacgacgacgacatcgatgcgttaatcgaggaacttcaatctaaccacggagtggacgacgaagattctgacaacgatgggcctgtggcagccggcgaagcgaggccggtccccgaagagtatttacaaacggatccgtcgtatggtctcactagcgatgaggtgctaaaacgtaggaagaaatatggccttaaccaaatggcggatgaaaaagaatcactcgtggtaaaattcgtcatgttttttgttgggccgattcaatttgtaatggaagcggccgcaatactggcagcggggctctctgattgggttgactttggcgtcatatgtggtctattaatgcttaatgcgggggttgggttcgttcaggaatttcaagccggaagtatcgtggatgagctaaagaaaacattagcaaacactgcggttgtcattcgagacggacaactcgtcgagatcccagcgaatgaagtggtgccaggtgatatcctgcaacttgaagacggcactgtcatacctacagacggtagaattgtgacggaagattgcttcctccagatcgaccaaagcgccataacaggggaatcactagctgtcgataagcattatggggatcagactttttcgtcatccactgtaaagcgcggcgaaggttttatggtagtcacggctacaggcgacaatacctttgtgggacgtgctgcggcgctcgtcaataaagctgcaggaggtcaaggacacttcacagaagttctcaacgggattggaattatccttttggtgttggttatcgcaactctcctattggtgtggacagcatgcttctaccgcacgaacggaattgttcggatcttgcggtataccctgggtattacgattataggtgtaccagtcgggctcccggcagtagtcacgaccacaatggccgtgggtgcagcgtatctggcaaagaagcaggctattgtacagaagctttctgccatagagtctttagccggcgtggagattctctgctcggataagacaggaactttaactaagaacaaattgtccctgcacgagccgtacaccgtagaaggcgtctcacctgatgacttaatgctgacggcctgcttggcagcgtcccgaaaaaaaaaaggacttgatgctatagataaagcgtttctaaaaagtttgaagcaatatcccaaagccaaggacgctctgaccaaatataaagtactcgagtttcacccattcgacccagtaagtaaaaaggtaactgccgtagtagaaagccctgaaggtgagcgtatagtttgcgttaaaggagctccactcttcgttctgaagacggtcgaagaggaccaccctatccccgaggatgtccatgaaaactatgaaaataaagtggcggagcttgcgagccgtgggttcagagcactgggtgtagcgcgtaaacgaggggaaggacactgggagattctcggtgtgatgccttgtatggacccaccgagggacgataccgctcagactgtaagtgaggctagacatctcggccttcgcgtcaaaatgttaactggagacgctgtagggattgcgaaggagacctgccgccaactaggattgggtactaatatctataatgcggaacgactgggtctcggcggcggaggggacatgcctgggtcagaattagctgattttgttgagaatgcggacggcttcgcggaggtattcccgcagcataagtatcgtgtcgtggagatcctgcagaatagaggctatttggtcgcgatgaccggtgatggcgtcaacgatgcgccttctttgaagaaggccgacacaggaattgccgttgagggtgcaaccgatgctgcgcgttctgcggctgatatcgtctttttagctcccggtctcagtgcgattatcgacgcactgaaaactagtagacagatcttccatagaatgtatagctacgtagtatataggatagccctaagcctccatctggaaattttcttaggcttgtggatagcaattctcgataactctttggacattgatcttattgtctttatcgccatcttcgctgatgttgcgacattggccatcgcgtacgacaatgcaccctatagtcccaagcctgtaaagtggaacttgcctcgcttatggggtatgagcataatcctagggatcgtactagcaattgggtcctggataacactgacaacaatgttcctcccaaaaggtggaataattcaaaacttcggcgctatgaatgggataatgttccttcaaatatccttgacggagaattggttaatatttattactagggctgctggtccattctggagttccatccccagctggcaactcgctggggcggtctttgcagtggatattattgccaccatgttcacactctttggctggtggtccgagaattggactgatatcgttaccgtagtaagagtctggatctggtctattggtatattttgcgtcttaggcgggttctactacgagatgtccaccagcgaggcttttgatcgtctgatgaatggaaagccaatgaaagaaaaaaagagtacccgctctgttgaagactttatggctgcaatgcaacgcgtttcaacgcaacacgaaaaagaaacctaa

SEQ ID NO: 5217 - DNA, 318 bp, Artificial Sequence
  Optimized genes for Saccharomyces cerevisiae
atggccccagttaagagccaagaatctataaaccaaaaattagcgctcgttataaagagcggcaaatacacgttgggctacaaaagcacagttaaaagtttaagacaggggaagtccaagttaattattattgccgcgaatacgcccgtcctacgaaagtctgaacttgaatattacgccatgctctctaaaacaaaagtatactactttcaaggtggcaataatgaactaggaaccgcggtgggtaaactattccgtgtaggggttgttagcatactggaggccggtgactccgacatcctgaccacgctggcctag

SEQ ID NO: 5218 - DNA, 468 bp, Artificial Sequence
  Optimized genes for Saccharomyces cerevisiae
atgaaagttgagatagattcgttttcaggtgcgaagatctaccctggacgcggcactctctttgtcagaggagactcgaagatcttccgattccaaaactcgaaatcagctagcttgttcaaacaacgtaagaatccgagacgtatagcatggacggtattgtttcgtaaacatcacaagaaaggcattacggaggaagtagccaagaagcgatccagaaaaactgttaaagctcaacgcccgataacgggagcctctctggacctcattaaggagcgccgctctctcaaacccgaagtacgaaaagctaatcgcgaagaaaaattgaaagcaaataaggagaagaagaaagcagaaaaggcagcacggaaagcggaaaaagccaagtccgccggtacacagtctagcaaattttcaaagcagcaggctaagggcgcattccagaaggtagcagcgacttctcgttag

SEQ ID NO: 5219 - DNA, 651 bp, Artificial Sequence
  Optimized genes for Saccharomyces cerevisiae
atgaagaccctaatcgtcgtcgacatgcagaatgacttcattagccccctgggtagcctaacagtgccgaaaggagaagaattaatcaacccaatcagtgatcttatgcaagatgctgaccgagactggcaccgcatagtcgtcacacgtgattggcatccatcaagacacatttcctttgcaaaaaaccacaaagacaaagagccgtactcaacttatacgtaccactccccgcgtcctggcgacgactccacacaagaggggatcttatggcctgtacactgcgttaaaaacacctggggatcacagttagtcgatcaaatcatggaccaagtcgtaacgaagcacattaagattgtagataaggggttcttgacagaccgtgaatattatagtgctttccatgacatttggaacttccataaaacggacatgaataagtatttagagaagcaccatacggacgaagtatacattgttggcgttgctctcgaatattgtgtgaaggctacggccatttctgctgctgaattggggtacaaaaccaccgtcttgcttgactatactcgccctatttcagacgatcccgaggtaattaacaaagtaaaagaagaactgaaagcacacaatatcaatgtcgttgataaataa

SEQ ID NO: 5220 - DNA, 1533 bp, Artificial Sequence
  Optimized genes for Saccharomyces cerevisiae
atgcccacttcgggcactacgatagagcttatagacgaccagtttcccaaagacgactcggcgtccagtggtatcgttgatgaagttgacctaacagaagcaaatatcctcgccactggactcaacaagaaggcgcctcgtatcgtaaatggttttgggtcgctcatgggttctaaagagatggtgagtgtggagttcgacaaaaaaggtaatgaaaaaaaatcgaacctggatcggttgttagaaaaggacaatcaggagaaggaggaagctaagactaagattcatatatcagaacagccctggactctcaataattggcaccagcacctcaattggttaaacatggtccttgtttgtggtatgcccatgattgggtggtactttgcgctctcggggaaggttccattgcacctaaatgtctttcttttcagcgtattctattatgctgtggggggtgtttcaataacggctgggtatcatcgattatggtcacacagatcgtatagtgcccattggccgcttcgactgttttatgctatcttcggctgtgcgagcgtagaagggtctgctaagtggtggggccattcgcatcgaatccatcataggtacaccgacaccctgcgagatccttatgatgccagacgaggactgtggtacagtcatatgggatggatgttgctcaagcctaatcctaagtacaaagcaagagcagatataacagacatgacagacgattggacaatccggtttcaacaccgccattacatacttttgatgttactaaccgcctttgtgatccctaccctcatatgtgggtattttttcaacgactatatgggcgggttgatatatgctggatttatccgtgtgttcgttattcaacaggcgaccttttgtatcaacagtctcgcgcactatattggcacgcagccttttgatgacagacggacaccacgcgataactggataactgccatagtcaccttcggtgaaggatatcacaatttccaccatgagtttcctactgattatcgaaacgcgataaaatggtatcagtatgacccgaccaaagtgataatataccttacgtctttggtcggattagcttatgatcttaagaagttttctcaaaatgcaatcgaggaagcacttattcaacaggaacagaagaaaattaacaagaagaaggccaaaatcaactggggccccgtgcttactgatctaccaatgtgggataaacaaaccttcctagcgaagagtaaggagaacaaagggcttgtcattataagcggcatagtccatgatgtttcaggttatataagtgagcatccaggaggtgaaacacttatcaagacagcgctggggaaagatgcaacaaaagccttctcaggtggagtttacagacactccaatgctgcgcaaaacgtgcttgctgatatgagagtagcggttattaaagaatcgaaaaattcggcaattcggatggcgtccaagcgtggcgaaatctacgaaactggaaaattcttctag

SEQ ID NO: 5221 - DNA, 735 bp, Artificial Sequence
  Optimized genes for Saccharomyces cerevisiae
atggcggccgagaagattttgacgcccgaatcgcagcttaagaaaagcaaagcacagcaaaaaacggctgagcaagtcgcagcagaacgtgcagcgcgtaaagccgcaaataaggagaaaagggcgataattctggaacgtaacgctgcataccagaaagaatacgaaaccgcagaacggaatattatccaggcgaagagggatgcgaaggccgcaggctcatactacgtagaggcgcaacataaattagtttttgttgtcagaataaaggggatcaataagattcccccaaagccccgtaaggtactccaattacttcgactgaccagaattaactccgggacatttgtaaaagttaccaaggcaaccttggagctcttgaaactaattgagccttatgtcgcgtacgggtacccgagttattcaacaattcggcagctggtatataaaagaggtttcgggaagatcaataaacagagggtcccgttgtccgataatgctatcatagaagcgaaccttggtaagtatggtattctatccatagacgacttgatccacgagatcattacggtaggaccacatttcaaacaagcaaacaatttcctgtggccgtttaaacttagtaacccatctggcggctggggcgtaccgcgaaaattcaagcatttcatccaagggggttctttcggaaacagggaggagtttattaacaaactggtgaaatctatgaattaa

SEQ ID NO: 5222 - DNA, 450 bp, Artificial Sequence
  Optimized genes for Saccharomyces cerevisiae
atgccctctcggttcacaaaaacccgaaaacatcgaggacacgtatccgcgggtaaggggcgcatagggaagcatagaaagcaccccggcggccgaggaatggcagggggtcagcatcatcaccgaattaacatggataagtaccaccccggctattttgggaaggtagggatgcgttattttcataagcaacaagcccacttttggaaaccagtactgaatttggataaactatggactctcattcctgaagataagcgtgatcaatatctgaaatctgccagcaaagagactgccccggtcattgacacgcttgcggcgggttacggtaaaattttgggaaaggggcgaatcccgaatgtacccgtaatcgtgaaagctaggtttgtttctaaacttgcggaggagaagatccgtgctgctggaggagtcgtggaattgatcgcgtag

SEQ ID NO: 5223 - DNA, 765 bp, Artificial Sequence
  Optimized genes for Saccharomyces cerevisiae
atgtcggctcctgaagcgcagcagcagaaacgtggcggctttgggggcaggaacagaggccgaccgaatagaaggggtccgcggaatacggaggagaagggctgggtccctgttacaaagcttggtcgcctagtaaaagcggggaagataacgacgattgaagagatttttttgcactctctccccgtaaaggagtttcaaataattgatacgttacttccagggctacaagatgaagtgatgaacattaaacccgtacagaaacaaactcgagccgggcaacgtactcggtttaaggcggtagtggtagttggagactcgaacggacacgtggggttggggataaaaaccgctaaagaggtagcgggcgcgatccgggctggcataataattgccaagttatcagtgattccaatacgacgcgggtattggggtacgaacctcggacaaccccacagcttagcgacaaaaaccacaggtaagtgtggatccgtcacggtccgtcttattcctgcgcccagggggtccggaatcgtagcatctccggcggtaaagaagctcctacagctcgctggcgtggaagacgtgtacacacagagtaacgggaaaactcggactctcgagaatacactgaaggccgcctttgtggctatcggaaatacatatggattcttgaccccaaacctgtgggccgaacagcctctccccgtgagccccctggatatttattcagatgaagccagcgcacaaaaaaaaaggttttag

SEQ ID NO: 5224 - DNA, 1131 bp, Artificial Sequence
  Optimized genes for Saccharomyces cerevisiae
atgtctacgtttggaaaactgttccgtgtcacaacttatggggagagccattgcaaatctgttggctgtatagtcgacggagttccgccgggaatgagcctaaccgaagcagacatccagccgcagctaacacggcgcagaccaggacaatcaaagctatcgacccccagagatgaaaaagatcgtgtggaaatacagagcggcacggagtttggcaaaacacttggaacacctatcgctatgatgattaagaacgaagatcaaaggccacatgattactcagacatggataaattcccccgtcctagccacgcagattttacctactcagagaaatatgggataaaggcgtcaagtggtggtggtagagcctccgctcgtgaaaccattggtagagtagcgagtggtgcgattgctgagaaattcctggctcaaaattcgaacgtcgagattgtagcctttgtcacacagataggcgaaatcaaaatgaaccgggattcgttcgacccagaattccagcacctattaaatactataaccagagaaaaggttgatagcatgggaccaattcgctgtcccgatgcgtcggtggcaggacttatggtaaaggagatcgagaagtatagagggaataaggactcgatcggaggtgtggtcacctgcgtggttcggaatctgcctacgggcttaggagaaccgtgttttgataaactggaggctatgcttgcacacgcaatgttgtcaataccagcctccaagggtttcgaaattgggtcgggatttcagggagtgtcagtgccaggaagcaagcacaacgaccccttttattttgagaaggagacgaaccggcttcgcacaaagacaaataacagcggtggggttcagggaggcataagcaacggtgagaatatttatttctccgtcccatttaaatctgttgcaactatctcccaagaacaaaagaccgctacctatgacggggaagaaggcatactggcagcaaaaggacgacacgaccccgcagtcacgcctcgcgcaatacctatagtagaggcgatgacggccttggtgctagccgatgccctactcatacagaaagcccgtgacttcagccggagcgttgtacactaa

SEQ ID NO: 5225 - DNA, 360 bp, Artificial Sequence
  Optimized genes for Saccharomyces cerevisiae
atgccaaaaaagagggcctccaacggccggaataagaagggtcgcggtcacgtgaagccagttcgttgcgttaattgctcgaaatcgattcccaaagacaaggctattaaacgtatggccatacgcaacatcgtagaggcagcagctgttagagatctgtcagaggcatccgtatatccggagtacgcattgccgaaaacatacaacaaacttcattattgcgtgtcgtgcgcaattcatgctaggatcgtacgcgtccgatcgcgagaagatcgtaagaacagagcacctccacagagaccgaggttcaaccgtgagaataaggtaagtccggcagacgctgcgaagaaggctctgtga

SEQ ID NO: 5226 - DNA, 612 bp, Artificial Sequence
  Optimized genes for Saccharomyces cerevisiae
atggcaagctttgctactaagttcgtcatagcgtgttttctcttctttagtgcgagtgcgcataatgtgttactgcctgcctatggtcgaaggtgtttttttgaggatctgtccaaaggtgatgagttatctatatcgttccaattcggagatagaaacccccaatcatcgtctcaactcacgggcgactttataatatatggccccgaacgacacgaggtattgaaaactgtacgggacacaagccatggggaaatcacattaagcgctccgtacaagggtcattttcagtattgctttttaaatgaaaacacaggtatcgagactaaagatgtaacctttaacatccatggcgtcgtgtacgttgacttggatgacccgaacacgaacacactggatagtgcggtgagaaagttatcaaaattgaccagagaggttaaagacgaacagtcgtacatagtaatacgtgaacgcacacatcgcaatactgcagagtcaaccaacgatagagtaaagtggtggtctatttttcagctcggcgtcgtcattgcgaacagcctattccaaatttactatttgcgccgtttctttgaagtgacaagtctagtttaa

SEQ ID NO: 5227 - DNA, 264 bp, Artificial Sequence
  Optimized genes for Saccharomyces cerevisiae
atggtaagccaactctttgaggaaaaggctaaagctgtaaatgagctgcccacgaaacctagtaccgatgagttgttggagttgtatgccctctacaaacaggccacagttggtgacaacgataaagagaaacccggaattttcaacatgaaagatagatataaatgggaagcgtgggaaaacctgaagggaaagagccaggaggacgctgagaaggagtacatcgcgttagtcgatcagctgatcgcgaagtacagttcttaa

SEQ ID NO: 5228 - DNA, 930 bp, Artificial Sequence
  Optimized genes for Saccharomyces cerevisiae
atgtctgccgtcttcaataacgctacccttagtggattggttcaggcaagtacctactcccagactctgcagaatgtagcgcactatcagcctcagctgaacttcatggagaaatactgggctgcttggtactcatatatgaacaatgacgttttggcaactggcctgatgttcttcctcctacacgagttcatgtatttcttccgctgcttaccatggttcatcatagatcagatcccgtattttcgtagatggaagttacaacccacaaagatccccagtgcaaaagaacagctttactgtctaaagtctgtcttgttgtcccacttcttagttgaggcgattcctatttggaccttccacccgatgtgcgaaaaactcggaattactgttgaggtcccattcccaagtttaaagactatggctttagagatagggttgtttttcgttctcgaggatacatggcattattgggcgcataggctattccactatggtgttttctacaaatatattcacaaacaacaccaccggtacgctgcgccatttggcttaagtgctgaatacgcacatccggccgaaacactctccctcggttttggaactgttggaatgcctattctatatgtgatgtacacaggtaaactccatctattcaccctttgtgtgtggataacgctccgtttatttcaggcggtcgattctcactctggctatgacttcccgtggtcgctcaataagatcatgccgttctgggccggagctgaacatcatgatctccatcaccattatttcatagggaattacgctagctcttttcggtggtgggactactgcttggatacagaatctggtcctgaagccaaagcgtcacgggaagagaggatgaagaagagagcagaaaacaatgctcagaagaaaaccaactag

SEQ ID NO: 5229 - DNA, 525 bp, Artificial Sequence
  Optimized genes for Saccharomyces cerevisiae
atgagtacaaaggctcagaatcccatgcgggatcttaagatagaaaaacttgtgttaaatatttcggtaggtgaaagcggcgaccgtctcaccagagcttccaaggtattggaacagttgagcggacagacacccgttcagtccaaggcgcgctacaccgtgcggacatttggcatccgcaggaacgagaagattgcagttcatgtgaccgtgcgcggtccaaaggccgaggaaatacttgagaggggtctgaaagtgaaggagtatcagctacgagacagaaacttttctgctaccggaaactttgggtttggtatagatgagcatattgatctcggaataaaatatgacccgtcgatagggatatttggtatggatttttacgtcgtgatgaataggccgggggctcgtgtaacgcgtcgaaagcgttgtaaaggcaccgtcgggaattctcataaaaccactaaagaggacaccgtcagttggttcaagcaaaagtatgatgctgatgtcctggacaaatga

SEQ ID NO: 5230 - DNA, 438 bp, Artificial Sequence
  Optimized genes for Saccharomyces cerevisiae
atgggaaaaggcaagccgcggggtcttaattcagctagaaagctgcgcgtacatcgccgtaataatcgctgggccgagaacaactataaaaaacgccttcttggtactgcgttcaagtcttctccctttggaggaagttctcacgcgaaaggtatcgtcttagagaagttaggtatcgagtcaaaacagccgaattcggcaattcggaagtgtgtaagagtgcagttgatcaagaatggcaaaaaggttaccgcatttgtcccgaatgatggatgcttgaatttcgtcgacgaaaatgacgaagttctcctagcggggtttgggcgtaaagggaaagccaagggtgacatccccggggtccgattcaaagtcgtgaaggtctctggagtttcactccttgctctatggaaagagaagaaagaaaaaccgaggtcctag

SEQ ID NO: 5231 - DNA, 468 bp, Artificial Sequence
  Optimized genes for Saccharomyces cerevisiae
atgaaggtcgaggttgattcattttctggtgctaagatctatcctgggcgaggaacgctattcgttcgcggtgactctaaaatttttcgttttcaaaacagcaaatcggcaagcttgtttaagcaacgtaagaatccaagaaggattgcatggacagtgctctttaggaaacaccataaaaagggcatcacagaggaggttgctaagaagcggagccgaaaaactgttaaggcacagcgccccatcacgggtgcctcattggacctaatcaaggaacgcagatctctgaaaccagaagtgcgaaaagctaacagggaggaaaaacttaaggccaataaagagaagaagagagccgaaaaggcggctcgtaaggcggagaaggcgaagtcagcgggggtacaaggaagtaaagtcagcaagcagcaagcgaaaggagcctttcagaaagttgctgctaccagtagatga

SEQ ID NO: 5232 - DNA, 1038 bp, Artificial Sequence
  Optimized genes for Saccharomyces cerevisiae
atggaagcacataatcaattcttaaaaactttccagaaggagcgtcatgatatgaaggaagctgaaaaagatgaaatattgttaatggaaaatagtcgtcgctttgtaatgttccccatcaaataccatgagatatgggccgcatacaagaaggtagaggcgagtttctggacagctgaggagattgaattggcgaaggacacagaagacttccaaaagctcacggatgaccagaagacatacataggcaacttgctggccctctccatatcctccgacaacttggtgaataagtacctgattgaaaacttctctgcgcagcttcagaaccccgagggcaagtcattttatggatttcaaattatgatggagaacatctactcagaggtgtattctatgatggttgacgcctttttcaaggatccaaagaatatccccttattcaaggaaatagctaacctcccagaagtaaaacacaaagccgccttcatagagagatggattagcaacgacgatagtctgtatgcggaacggctagtggcttttgctgcaaaagaggggatttttcaagcaggaaactacgctagcatgttctggttaaccgataagaaaattatgccaggcttggccatggccaacaggaacatttgcagagaccgaggagcctatacggacttctcgtgcttattatttgcgcacttacgtactaagcccaacccaaaaattattgagaaaatcataacagaagcagtcgagatcgagaaggaatattactccaatagtcttccagtagagaaatttggtatggacctcaagtcgatacacacttatattgaatttgtcgctgacggcctgctgcaaggatttggcaatgagaagtactataatgcggtaaatccctttgagtttatggaagatgtagcgacggcgggcaagactacatttttcgagaagaaggtgtctgactatcagaaagccagtgatatgtctaaatctgcaacgccatccaaggaaataaactttgacgatgatttttag

SEQ ID NO: 5233 - DNA, 201 bp, Artificial Sequence
  Optimized genes for Saccharomyces cerevisiae
atgtcgttctcatcattatacaaaacatttttcaaacgcaacgcagtatttgtgggcacaattttcgcgggagcgtttgtgttccaaacagtctttgatacggctataacatcttggtacgaaaatcacaacaaaggaaagctttggaaagacgtaaaggcgaggatcgctgccggagatggagacgatgatgacgagtag

SEQ ID NO: 5234 - DNA, 999 bp, Artificial Sequence
  Optimized genes for Saccharomyces cerevisiae
atggtaagagttgctataaacggctttggcaggatcggccggctggtgatgcgcatagcgttatcgagacccaacgtcgaggtcgtggccttaaatgaccctttcatcaccaatgactacgctgcttatatgtttaaatacgattcaacccatggccggtatgccggggaggtgtcacatgacgataaacacattattgttgacggcaaaaagatagcaacgtatcaggaaagggatccggccaatttaccgtggggcagttctaacgtagacattgcgatcgactctacaggggtatttaaagagttggacacagcccaaaagcatatcgatgcaggcgcaaagaaagtggttataaccgcgccctcttccactgcgcctatgtttgtgatgggggttaacgaagagaagtatacttccgacctgaagatagtttctaatgctagttgcacgactaattgtctggccccgctcgcgaaagtcatcaacgatgcatttggcatagaggagggcctaatgacaactgttcactccttaacagccacccaaaaaacagtagacgggccttcccataaagattggcggggtggtcgcacggcatctgggaacattattcccagttcaacgggggcagcgaaggcagtcggtaaagtgctccccgagctgcaggggaaattgactggaatggctttccgtgttccgaccgttgatgtttccgtagttgacctcactgtgaaattaaataaagagaccacatacgatgaaataaaaaaggtagtgaaagcggccgccgagggaaaactaaaaggggtacttggttatactgaggatgctgtggtctcatcagacttccttggagattcgcacagtagcatctttgacgcatcggcgggaatacagctaagccctaaattcgttaaattggtgtcgtggtacgacaacgagtatggttatagtacacgagtagtggaccttgtcgaacatgtagcaaaagcatag

SEQ ID NO: 5235 - DNA, 2841 bp, Artificial Sequence
  Optimized genes for Saccharomyces cerevisiae
atggcggggcaggtactagacggaaaagcatgcgcacagcagttccggtctaacatagccaatgagatcaaatcaattcaaggccacgtgccaggcttcgcccctaatctcgcgatcatccaggtgggaaatcgtcccgacagtgctacctacgttcggatgaagcgtaaggcagccgaagaagcaggaatcgttgcgaatttcattcatctggatgagtcagctacagaattcgaggtattacgctatgtagaccagctcaatgaagacccacatacccatgggataatagttcagctacctttgcctgcccatctggacgaagatcgcatcacttcacgcgtgctagcagagaaggatgttgacggatttggaccgactaatataggtgagctcaataaaaagaacggtcatccgttcttcttaccatgcacacccaaggggattattgaactcttacataaggccaacgttaccatcgagggatctaggtcggttgtcattgggagatcagatattgtcggctccccagtcgcggaactcctgaagtcgttaaactctaccgtcaccatcacgcacagcaagacgcgtgatatcgcgtcataccttcatgacgcagacattgtcgtcgtggcaattggacaacccgaatttgtcaaaggagaatggttcaagccgcgagatggtacatcgtctgacaaaaaaaccgtggttattgacgtagggaccaactatgtggctgacccgtctaagaaatcgggtttcaagtgcgtaggcgacgtcgagtttaacgaggctattaaatatgtccatctaattacgcccgtccctggcggtgtaggaccgatgacggtggcaatgttaatgcagaataccttaatcgcagccaaacgtcagatggaggaatcatcaaagcccttacaaatcccccccttgcctctgaaattgctcacgccagtcccgtctgacattgacatttcgcgcgcccagcagccaaagttaattaatcagttagctcaggaacttggtatttactcacacgaattggagttgtatggccattataaggccaagatctcgcctaaagttatcgaacgtctgcaaacgcgacaaaatggcaagtatatcttagtatctggcattacaccaacacccctgggcgaggggaaaagcacgacgaccatgggtctggttcaagcacttacagcccacttaggtaagccggctatcgcgaacgtaagacagccctcactcggacccacattaggcgtgaagggtggggcggctggcggtgggtatagtcaagttattcccatggatgaatttaacttgcacttaaccggtgatatacatgcaataggggcagctaataacctgctcgctgcggcgattgatacccgaatgtttcatgaaacgactcagaagaacgatgccactttctacaatagattggtcccccgcaaaaatgggaaacgaaaatttaccccgtctatgcaacgtcgacttaataggctaggtatacagaagacaaatccggacgacctgactccagaagagatcaacaagtttgcacgcctgaatattgatcctgatacgattacaatcaagagagtagtagacatcaatgatcgtatgctaaggcaaataactattggccaggcgcctactgaaaagaatcatacccgggttaccggtttcgacattacagtcgcaagtgaactaatggctatactggctcttagcaaagacctcagggatatgaaagaaaggatcggaagagtagtcgttgcagccgatgtaaaccgatccccagtgactgtcgaggacgtgggctgtacgggagccctcactgccctattgagagatgcaattaagcccaatttgatgcagaccttggaagggacacccgtgttagtacatgcgggtccgttcgcgaacatcagtataggcgctagctccgtaatcgcggacagagtggccctgaagttggttggtacggaaccagaggctaagacagaggccggttatgtagtaaccgaggccggtttcgatttcacaatgggtggagaacgcttctttaatatcaagtgccgctctagtggattaacgcctaatgccgttgtattggtcgcaacagtaagggccctgaagagccatggcggggctcccgacgtgaagcctggacagccattacccagtgcatacactgaagagaatatcgaatttgtggagaaaggcgcggccaatatgtgtaaacagatcgcaaacattaagcagtttggtgtccccgtcgtggtggcaataaataagttcgaaacggatacggaaggtgaaattgctgccataagaaaagctgcactagaggctggtgcattcgaagctgtcacgtcaaatcactgggcggaggggggaaaaggcgcgattgatcttgcaaaggcagtgatagaagcatctaatcagcccgttgacttccatttcctctacgacgttaattcttctgtggaggataaattgactacgatcgttcagaaaatgtacggtggtgcggcgatagatatactccccgaggcgcagagaaagatcgatatgtataaggaacagggattcggtaatttgccgatctgtattgcgaaaactcaatacagcctcagccacgatgccacgttaaagggggtccccacgggatttaccttcccgattcgggacgtacgattgagcaatggtgcaggatacctatatgcactggcagcggaaatccagacaatccccggtcttgccacatatgctggttatatggcagtagaggttgacgatgacggggaaattgacggtctgttttga

SEQ ID NO: 5236 - DNA, 759 bp, Artificial Sequence
  Optimized genes for Saccharomyces cerevisiae
atgtctcttcctgctacttttgacttaacaccagaagatgctcaattgcttctggctgctaatacgcacttgggtgcaagaaatgtacaggtgcaccaggaaccctatgttttcaatgctagaccagatggtgtgcacgtcatcaacgtaggtaagacttgggagaaacttgtattagcggctcgaatcatcgctgcgatccctaatcctgaggacgtggtcgcaatatcttcgcgaactttcgggcagagggccgtacttaagtttgctgcgcacacgggagccaccccaattgcaggacgttttacccccgggtcctttacaaactacatcactaggtcgttcaaggaaccacgactcgtgatagtgaccgatccccggtcggatgcccaggccattaaagaggcgagctatgtgaatatcccggtaattgcgctcacggatctagattcccccagcgaatttgtcgatgttgctatcccctgcaataaccgaggaaagcactcgatcggtttgatatggtatcttctcgcgcgtgaagtattgcgcttgcgtggcgcgttagttgaccggacacaaccttggtctatcatgccggacctctatttctatcgggatccggaggaggtagaacaacaggtagcagaggaagccacaactgaagaggccggtgaggaagaggcgaaggaagaagttacagaggaacaagcggaggctacagaatgggcggaggaaaatgccgataatgttgaatggtag

SEQ ID NO: 5237 - DNA, 1314 bp, Artificial Sequence
  Optimized genes for Saccharomyces cerevisiae
atggcggtgtcaaaagtatatgcccggtcggtgtatgatagccgtggtaaccctaccgtagaggtagaactaaccactgaaaagggcgtttttcgttccattgtgccatccggcgcatctactggagtccatgaggcactcgagatgcgggacggggataagtctaagtggatgggtaagggggttctgcacgctgtaaagaacgtcaatgacgtaattgcaccagcattcgtaaaggctaacatcgatgtgaaagaccaaaaggcagtcgatgactttttaataagtttagatggcacagccaacaaatcgaagctgggagcaaacgcgatattaggggtcagcctggctgcttctagagcagcagccgccgaaaagaatgttccattgtacaagcatctagccgacttgagtaagtcgaagacaagcccctacgtgttgcctgtcccctttctaaatgtactaaacggggggtcgcatgctggcggagcactggcgttacaagaattcatgattgctcccacaggagcaaaaacattcgcagaggcactcaggataggcagcgaagtatatcacaacctaaagtccctgactaagaaacggtatggcgcctcggcgggcaatgtaggagatgaagggggggtggctcccaacatacaaacggccgaagaggcgttggacttgatagtcgacgccataaaagctgccggacacgatggaaaaataaagattggtctagactgtgcaagtagtgagtttttcaaggacggaaaatatgacttggacttcaagaatccgaatagcgacaaatctaaatggctaacggggcctcagcttgccgatctttaccattcattaatgaagcggtatcccattgtttccattgaggatccttttgcagaagatgattgggaggcttggtcgcatttttttaagaccgcgggtatccaaatagttgcggacgacttgaccgtcaccaacccaaaacggattgcaacggcaattgaaaagaaagctgcggatgcgctcctgctcaaagtaaaccagattggcacgcttagtgaaagcatcaaagcagctcaagacagctttgcggccggctggggggtcatggttagccaccgatcgggtgagacggaagatacgttcattgctgatcttgtagtaggtctgcgtactggacagattaagactggcgcccctgcacgatctgagagacttgccaagctgaatcaattgttgagaattgaagaagagttaggtgataacgctgtgtttgccggtgagaactttcaccacggagataagttgtga

SEQ ID NO: 5238 - DNA, 1161 bp, Artificial Sequence
  Optimized genes for Saccharomyces cerevisiae
atgcgtctttctaatctaatcgcttctgcaagcctactgtcagctgcaacactcgccgctccagctaaccacgaacataaggacaagagagcggtcgtgactaccacggtacaaaagcaaacgacaattattgtgaacggtgcggcttcgactccagttgcagccctcgaggaaaacgcggtcgtaaattccgccccggcagctgctacaagcacgacttcctctgcagcctctgtcgctacggctgccgctagctcttcggaaaacaattctcaagtatcggcagcggcttcaccagcgtcgagctcagcggcaacgagtacacaaagctctagttcttcgcaggcgagttctagctctagcagcggagaagacgtcagttctttcgcgtccggcgttcggggaatcacgtatacgccgtacgagagtagtggagcctgcaaaagcgctagcgaggtagcgtccgatctagcgcagctgaccgattttccggtcatccgtttatatggcactgactgtaatcaagtcgagaatgtgtttaaagcgaaggcttcgaaccaaaaagtcttcttagggatatactatgtggaccagattcaagacggtgtcaatactattaaatccgcagtggagtcttatggtagttgggatgacgtcactacggtttcaatcgggaacgaattggtaaacggtaatcaggccacgccctcgcaagtaggacagtacatcgacagcggacgatctgcactgaaggctgctggctacaccggaccagtcgtctcagtcgacacctttatcgcagtcataaataatccagagctctgcgattacagtgactacatggcggtaaacgcacacgcctatttcgataaaaacaccgtggctcaagacagcggaaaatggctattagaacaaattcaacgggtatggacagcatgcgacggaaaaaagaatgtggtaattactgaatctggctggccatccaagggagagacctatggtgttgcagtccctagtaaggaaaaccaaaaggatgctgtaagtgccataacgtcctcttgcggggcagacacctttttgttcactgcttttaacgactactggaaagctgatggcgcatatggagtggaaaaatattggggcatcttaagtaacgaatag

SEQ ID NO: 5239 - DNA, 942 bp, Artificial Sequence
  Optimized genes for Saccharomyces cerevisiae
atgcggtttagcacaacgctggctacggccgccaccgctttatttttcaccgcttctcaggtttctgcaattggagagctggcttttaatttaggagtaaaaaataacgatggaacgtgcaagagtacttccgattatgaaaccgaattacaagcgcttaaaagctacacatcaacagttaaagtctatgcggcttccgactgtaacacccttcagaacctaggtccggccgcagaagccgaagggttcaccatctttgtaggtgtctggccaacagatgacagccactacgcagcagagaaagccgccttacaaacatatctcccaaagattaaggagagtactgtagcgggatttttagtcggatcggaagctctttataggaatgaccttactgcgtctcaactatccgataagattaatgatgtgcgttcggttgtggctgacatttcagatagcgacggtaagtcttacagcggaaaacaagttggcacggtggactcatggaacgtactagtcgcgggttataattcggcagttattgaagcctccgactttgtcatggcaaacgcattcagctattggcagggacagaccatgcaaaatgcatcctactcattctttgatgatatcatgcaagcgctccaggtaatacagagtactaagggatcaaccgacattacattttgggtgggagaaactggatggccaactgatggcactaatttcgaatctagttacccgtcggttgataacgcaaaacagttctggaaagaaggcatatgtagtatgagggcctggggggttaatgttattgtctttgaagcattcgatgaggactggaaacctaatacgtcggggacttccgatgtagaaaagcattggggggtctttacaagctcagacaacttgaagtattctctagattgtgatttttcttaa

SEQ ID NO: 5240 - DNA, 366 bp, Artificial Sequence
  Optimized genes for Saccharomyces cerevisiae
atgagcgatttccaaaaagaaaaggtagaggagcaagagcaacagcagcaacagatcatcaagattcgtataactcttacgagcactaaagtgaaacagctggaaaacgtcagttcaaacattgttaaaaatgctgagcagcacaatctggttaaaaagggtccagttcggcttccaacaaaagtgttgaaaatatctacaaggaaaacaccgaacggggaaggatctaaaacctgggaaacgtatgaaatgcggattcacaaacgctatatcgacctcgaggcgcctgtgcagattgtcaaacgtattactcagattacaatcgagcctggagtggatgtggaggttgtggttgcgtcaaactag

SEQ ID NO: 5241 - DNA, 771 bp, Artificial Sequence
  Optimized genes for Saccharomyces cerevisiae
atggcaccaggtaaaaaagtggcacctgccccctttggagcaaaatctacaaagagtaacaagacgcgcaaccccttgactcactctacccctaaaaattttgggatcgggcaggcagttcaacctaaacgcaatcttagtcgatacgtaaagtggccagagtacgtgcgagtgcagcgccagaaaaagattctttccatacggttaaaggtcccgccgactatcgcgcaatttcagtataccctcgatcgaaatactgcggcggaaacattcaagctgttcaataagtaccggccggaaacagcggcggagaaaaaagagcgattgaccaaagaggcggcagccgtcgcggaggggaaatcaaagcaagatgcatcaccgaagccatacgcagttaaatatgggttgaaccacgttgtagcactcatcgagaacaagaaggctaagttggtactaatcgcgaatgacgttgaccctatagaacttgtagtcttcctccccgcgctctgcaaaaagatgggcgtcccttatgctattgttaaagggaaagcgaggctcgggacgttagtaaatcaaaaaacctcagccgtggcagcgcttaccgaagttagagccgaagatgaagccgcactcgctaagctagttagcactatagacgcgaacttcgctgataagtacgacgaggtaaagaagcattgggggggtggtatcctgggaaacaaagcccaggcaaaaatggataaaagagcaaagaacagtgatagcgcatga

SEQ ID NO: 5242 - DNA, 1593 bp, Artificial Sequence
  Optimized genes for Saccharomyces cerevisiae
atgtcagccacaaaaagtatagtaggagaggccttagaatacgtcaacattggtttgagccactttctcgcccttccactagcgcaacgtatctcgctaatcatcataattccgttcatctataacatagtatggcagctcctctatagtctaaggaaagaccgtcctcctcttgtattctattggatcccttgggtggggtcagctgtggtatacgggatgaaaccgtatgaattctttgaggaatgtcaaaaaaaatacggtgacatttttagtttcgtgctactgggaagagtaatgacagtttacctaggcccaaaaggacatgagttcgtattcaacgcgaagttagccgacgtcagtgcagaagcagcttatgcccatctcaccacgccagtatttgggaagggtgtaatatacgattgtcccaatagccgactcatggagcaaaagaagttcgtgaaaggggccctcacaaaagaggcttttaagtcctacgtacctctcattgctgaggaagtgtataagtactttcgagacagcaagaacttccgacttaacgaaaggactacaggaacgattgatgtaatggtaacacagcctgaaatgacaatctttaccgcttccaggagtctgctcgggaaagagatgcgcgcgaagctcgatacagattttgcttacctctacagcgatctcgacaagggcttcacgccaatcaacttcgtgttccccaatctaccgctggaacactaccgcaagcgcgaccacgcgcagaaggccatctccgggacatacatgtctctgatcaaggaaagacgtaagaacaacgatatacaagatcgcgatttaatcgactctctaatgaaaaacagtacatacaaagatggagtcaaaatgaccgatcaggagatagctaatttgttaatcggggtactcatgggcggtcaacatactagtgctgccacatctgcctggatattgcttcatttggcggagcgtccggatgttcagcaggaactgtacgaggaacaaatgagggtgcttgatggcgggaaaaaagagttgacgtatgacctgttacaggagatgccgcttttgaatcagactataaaggagactcttcgtatgcaccacccactgcacagcctgtttaggaaggtaatgaaagatatgcacgtacctaacacaagttacgtaatcccagctggttatcatgtcttggtttcgcccggttatacccatcttcgggacgagtactttcccaatgcgcatcaatttaacattcatcgatggaataaggatagtgcctccagctattctgtaggagaggaggtagactatggattcggagcgattagtaaaggagtgtcgtctccctatctaccgttcggtggtggccgacatcggtgtattggggagcatttcgcttactgccaattaggagtgctaatgtctattttcattcgaacgttgaagtggcattatccggaaggaaagacggtgccccctccggatttcaccagcatggtcacgctgccaacgggacctgctaagatcatttgggaaaagagaaaccccgaacaaaagatttga

SEQ ID NO: 5243 - DNA, 1392 bp, Artificial Sequence
  Optimized genes for Saccharomyces cerevisiae
atgagcgatggaactcaaaaactttggggcggccgtttcacgggagagactgatccgttgatgcacttgtataacgcttctttgccttacgattacaaaatgtataaagctgacctggaagggacaaaagtatacacggcgggtctgcagaagctgggactgctgaccgaaaccgagttggccaagatacatgagggtcttgctgagattaagaaagaatgggatgctgataagttcgtacggcatccaaatgacgaggatatacacacggctaacgaaaggcgtctgggggagttaataggtcgtgatatcgcagggaaggttcacaccggtcgtagcagaaacgatcaggttgtcactgatttgagaatctactgccgcgacatagttaatgataccttattccccgcattaaaaggtttggtcgaagtcttaattaagcgtgctgaaggggagatagacgtcttgatgcccggatatacacatctgcagcgggcacaacccattagatggtcacattggctcagttcgtacgcgacttattttactgaagattataaacgtctgggccagattctgcatagattgaaccagagtcctcttggcgcgggggcgttggccggacacccatacgggatcgatagagagtttctggcagaggggttgggctttaactctgtaatagggaatagcctggtggcggttagtgatagggatttcatagtggaattaatgttttggggcacgctattcatgaaccacatctcccgattcgcggaagatctcatcatttattgtactgcggagtttggtttcatacaattgtctgatgcctatagtacgggttcaagtctaatgccccaaaagaaaaatgccgacagtctggaacttcttaggggaaaatccggtagggtttttggtgacctaaccgggtttctcatgtccctcaagggtataccttcgacttacgacaaggacatgcaggaggacaaggaacccttatttgactgccttacgacagtcgagcattccatgctcatagccacgggtgtaatctcaacactcacggttaacaaggaaaagatggaagcggcactaacgatggatatgttagcgactgacctcgcagactatcttgtacgcaaaggagttccgtttcgagaaacccatcacattagtggtgagtgtgttgctacagcggagaggttgggcctgtcgggcatcgataagctaaccttggaacagtaccaaaagatagattcaaggtttggacaggatctctttgagactttcaatttcgagcagtccgtagaaagacgagatgccaccggtggtaccgccaagagtgcggttttaaaacagcttgataatttaaagagtcaattaaattag

SEQ ID NO: 5244 - DNA, 249 bp, Artificial Sequence
  Optimized genes for Saccharomyces cerevisiae
atggtactggttcaggacctcttgcacccgactgcagcgtcggaagcgcgcaagcataagctaaaaacacttgtccaaggaccgcggtcttattttctcgacgtcaaatgtcccgggtgccttaatatcactacggttttcagtcatgctcagactgcagttacatgcgagtcttgttcgacagtcctttgtactcctaccggaggtaaggcaaagctcagcgaaggcactagtttccgccggaaatga

SEQ ID NO: 5245 - DNA, 186 bp, Artificial Sequence
  Optimized genes for Saccharomyces cerevisiae
atgttttcggagttaataaactttcagaacgaaggacatgagtgccagtgccaatgcgggagttgcaagaataatgaacaatgccaaaagtcgtgttcctgccccacagggtgcaacagcgacgacaagtgcccttgtggcaataagtctgaggaaacgaagaagtcgtgttgcagcggaaaatga

SEQ ID NO: 5246 - DNA, 978 bp, Artificial Sequence
  Optimized genes for Saccharomyces cerevisiae
atgaagttcaatttctctactattttcaatatactcttctttctctttacgctcattgaagccaacagtaatggtgaaacggtaaaactcatcacttccgacgggattgtctactcttatgctgtttataccaagacccttgcgcctgcgagggtagtcgtgaaaacaatatcgtatactactactcgcgtgtacccaataaccttggcgaactcggttgtgtcctcgacgacagagaagataactgaggtttcaacggtgtccgcatcggagcaagtttctgctactcaaaccaattcgcttgtcagcactagtaccgtttctacgatctcaccaacaatcagttcaggttcctccaccagctctagttcgacatatgatattgaatcatctcaatcaatcgaatcttcggggacatcaagcgcgaccgcggaaccgtctgcctcatcgggttttaggctcactagttctagtgcgtttgtgtcatctacggctccgttttcctctcagctatcttcaagttcctcgtctgagacgtcatcttcctctttctcgaccagctcttctagcgcccccctcagtttaacaagctcgtcttcctctagttcgagcttcgcaacaataatcaccttagctccctctagtagcaagtctgggaactctcaactaacactcgctagctcctcaagtacgtctgccgttgagagctcacaaaccggttctactatagccaggacgacttcgacattagttccctcatcatcagtggatactacaagtcgtgctacgacatcaatgccgctggaatcgagttctactcaaagtataagcgtttcctcttcggatgggacgtgttatgtattctatgacgacgacgattattactccacggtctatctgactaatcctagccagtcggtggacgctgcgactaccataacgtcaaccaatacgatctatgcaactgtgacaatctag

SEQ ID NO: 5247 - DNA, 390 bp, Artificial Sequence
  Optimized genes for Saccharomyces cerevisiae
atgtcgacatcatctgtacgcttcgccttcaggagattctggcagtccgagaccggcccaaaaacagtacacttctgggctccaactttgaaatggggcctagtatttgcgggattctcggatatgaaaagacccgttgagaaaatcagtggagcgcaaaacttgtcgctgctttcaacagcccttatttggacaagatggtcgttcgtcataaaaccccgcaacatactgctagcttcggttaacagtttcctgtgtttgacagcaggctaccagttagggcgcatcgccaattataggatacgaaacggcgattcgataagtcagctctgctcttatatactcagcggggcggatgagagtaaaaaggaaattaccaccggtcgttag

SEQ ID NO: 5248 - DNA, 1314 bp, Artificial Sequence
  Optimized genes for Saccharomyces cerevisiae
atggcggtatccaaggtttacgccagatccgtgtacgactcacggggcaaccctacggtagaggttgagctaaccacagaaaagggagtttttcgatccatcgttccctccggtgcgtcgactggtgttcacgaggcccttgagatgcgagacgaagacaagtcgaagtggatgggaaagggagttatgaacgcggttaataacgtcaataacgtcattgccgcagcttttgtcaaagccaatttagatgtcaaagaccaaaaggcagtcgacgattttctgcttagccttgatggaacagcgaacaaatcgaaactgggagctaatgcaattttgggcgttagcatggccgctgcgagagccgcagctgcagaaaaaaatgtgcccttatatcagcacttagctgatttatcgaagtcgaagacctcaccgtatgttcttcccgttccatttctgaacgtattgaacggcgggtcacacgcggggggagcattggccctgcaggagttcatgatcgcccctacaggtgccaagacgttcgccgaggccatgcgtataggaagtgaagtttaccacaaccttaagtccttgacaaaaaaacgttatggtgcgagcgctggaaacgtaggcgacgagggtggggtcgccccgaatatccagacagctgaggaagccctggatcttatagtcgacgcgatcaaagccgccggtcatgacgggaaggttaaaatagggctcgactgtgcctctagcgaattcttcaaagatgggaaatacgatctagatttcaaaaacccagagtccgacaagtccaagtggcttacgggggtggaactcgcggatatgtatcattcccttatgaaacgatatcccattgtgagcatagaggaccccttcgcggaggatgactgggaagcttggagccacttttttaaaaccgctggcatacagatagtcgcagatgatctcacggttaccaatccagccagaattgcgaccgcaatagaaaagaaagccgctgacgctctgctgttgaaggtaaatcagatcggcactctttccgagtcgatcaaagccgcccaggattccttcgcggcaaactggggagttatggtcagccaccgttcgggggaaaccgaggacactttcattgcggatcttgttgttggacttaggacaggccaaattaaaacaggagcgccagcccgctcggaacgattagcaaaacttaatcagttgctaaggattgaagaagaattaggagacaaggccgtgtacgcgggggaaaactttcaccacggggataagctctga

SEQ ID NO: 5249 - DNA, 1470 bp, Artificial Sequence
  Optimized genes for Saccharomyces cerevisiae
atgtcagcagattttggcctgatagggctagctgtcatgggacaaaatttgattttgaatgcggcggaccatgggtttactgtgtgcgcttacaatcgaacacagtctaaagtcgaccatttcttggccaatgaagcaaagggtaaatctataatcggtgctacttccatcgaggattttatttcgaaactgaaacggccccggaaggtgatgctcttggtcaaggccggggcgccggttgatgcattaatcaaccaaatagtgccgcttcttgagaaaggagatataataattgatggaggcaattcgcacttcccagattcaaaccggaggtatgaggaactaaagaagaagggaatactgttcgttggcagtggagtttcgggtggcgaggaaggggctagatatgggcctagtcttatgccaggagggagtgaggaagcgtggccccacatcaaaaacatcttccagtcgatttcagccaagagcgatggcgagccctgctgcgagtgggttggtcctgcgggtgccggacactacgtcaagatggttcacaacggaatagagtacggagatatgcagctaatatgcgaggcttatgatattatgaaacgcttaggtggttttactgataaagaaattagcgacgtttttgcgaagtggaataacggggtccttgatagtttcctggtcgagattacacgggacatattgaagttcgatgacgtcgacggaaaaccactggtagagaagataatggataccgcaggccaaaaagggacaggaaagtggacggcaattaacgccttagatcttggtatgccagtcactctaataggtgaagcggtgttcgcaagatgcttgagtgctttaaaaaacgagcgcatacgtgccagtaaagtgttgcccggtccagaggtccctaaggacgccgtaaaagaccgggaacaattcgtggacgatctggagcaggctctctacgccagcaagataatcagctatgcacagggattcatgttgatcagggaagctgctgctacatatgggtggaaactcaataatccggcgatcgcccttatgtggagggggggttgcattataaggtcggttttcttaggacagatcactaaagcgtatcgagaagagcctgacttagaaaacctgcttttcaataaattctttgcggatgccgtaactaaagcgcaaagcggatggcggaaaagcatcgccctggcaacaacatacggtatacccaccccggcatttagtactgctttatcattctatgacgggtaccggtccgaacggctacccgcgaatttgctgcaagcacaaagagattacttcggggcccacacgtttcgagtattaccggagtgtgcttcggataaccttccagttgacaaggacattcacataaattggacaggccacggcggaaacgtcagtagctcaacctatcaagcgtga

SEQ ID NO: 5250 - DNA, 525 bp, Artificial Sequence
  Optimized genes for Saccharomyces cerevisiae
atgagcgcaataccagaaaatgcgaacgttacagtcttgaataagaacgaaaaaaaagcacgagaattaattgggaagctagggctgaaacagataccaggtatcatcagggttacgttccgcaagaaggataatcagatctatgcgatagagaaacccgaggtattccggagcgcagggggcaattacgtagtctttggcgaggctaaggttgataactttacccaaaaacttgcggcagcgcaacagcaggctcaggcaagtgggataatgccttccaacgaggacgttgcgacgaaatctcccgaggacattcaagcagatatgcaagctgccgctgaagggtctgtcaacgccgccgcagaggaggatgatgaggagggcgaggtagatgctggagatttgaacaaggatgatatagagctggtagttcagcagacaaacgtttccaagaatcaggccattaaagctctaaaagctcataatggcgatctggttaatgcaataatgtcactttccaaatga

SEQ ID NO: 5251 - DNA, 855 bp, Artificial Sequence
  Optimized genes for Saccharomyces cerevisiae
atggctatagatgcccaaaagttagtcgtagttatcgtaattgtagtggtaccgttgttgtttaaatttattataggcccgaaaaccaagcccgtacttgacccgaagcgtaacgatttccagtcattcccgcttgtcgaaaagacgatccttacacataatacgtcgatgtataaattcggtttaccacacgctgatgacgtacttggattaccaatcggccaacatatagttattaaagcgaatatcaatgggaaggacattaccaggtcttatacccccacatccttggatggcgatacaaaaggcaactttgaacttctcgtaaagtcttatcccacgggaaatgtatcaaaaatgataggggagctaaaaataggagatagtatccaaataaaggggccgcgtggaaactaccattacgaaaggaattgtagaagtcatttgggaatgatagcgggcgggactgggattgcacctatgtatcaaattatgaaggcaatagccatggacccccatgatacaactaaggtttctctagtatttggaaacgtccatgaggaagacatcttgcttaagaaagaactggaagccctcgtggctatgaaaccgtcacagttcaaaatcgtgtattacctggattctccagatcgagaagactggactggcggtgtgggatacattactaaggacgtaataaaggagcacctaccggccgctaccatggataacgtccaaatacttatatgtgggccacccgcaatggtcgcgagtgtaaggagatcgacggtagatcttggatttcggcgatctaagcctttatctaaaatggaagaccaagtcttcgtattttag

SEQ ID NO: 5252 - DNA, 366 bp, Artificial Sequence
  Optimized genes for Saccharomyces cerevisiae
atggcgcaaagagtcacgttccgtcgacggaatccgtataacactcggtcaaacaaaataaaggttgttaaaacgcctggcggtattctaagagcacaacacgtgaaaaaactcgccacccgccctaaatgcggggattgtgggtctgcattgcagggtattagcacgctgcgccctcggcagtacgccacggtgtctaaaactcacaaaaccgtcagtcgggcatacggcggtagccgttgcgctaattgcgtaaaggaacgtatagtccgagcctttctaatagaggagcagaaaatagtaaaaaaggtcgtcaaggaacaaaccgaagcggcaaagaagtcagaaaagaagtcaaagaagtga

SEQ ID NO: 5253 - DNA, 600 bp, Artificial Sequence
  Optimized genes for Saccharomyces cerevisiae
atgtctgtcgaacctgttgtagttatagacggtaaaggtcatctagttgggcgactcgcctcggttgttgcgaaacaacttttgaatggtcaaaaaatagtggtagtccgggccgaagaacttaatatcagtggtgaatttttcaggaacaagcttaagtaccatgatttcctaagaaaagcgacagcatttaacaaaacaagaggtccattccactttcgagcaccttcgcggattttttataaagcattgagagggatggtgagccataagactgcacgagggaaagcggcattggaacggttaaaagtatttgagggcataccgccaccatacgacaagaagaagagagttgtcgttccacaggccttgcgtgtgttacggctaaaacctggacgtaagtacacgactctaggcaaactctcaacatcagtgggttggaaatatgaggacgtggtagcaaaacttgaagcaaagcgaaaggtttcgtctgcagaatactatgcaaagaagcgagcctttacgaagaaagttgcgagcgcaaacgcgaccgcagcggaatcagacgtcgcgaaacaactagctgctcttgggtattag

SEQ ID NO: 5254 - DNA, 5277 bp, Artificial Sequence
  Optimized genes for Saccharomyces cerevisiae
atgaaggtgtcggataggcggaagttcgagaaagccaatttcgatgagttcgaatcagcgttaaacaacaaaaacgatcttgttcattgtccgtcaataaccttgtttgagagcatacctaccgaggtcaggagcttttacgaagatgaaaagtcggggttgatcaaggtcgttaaatttcgtactggggccatggaccgtaagcggtcattcgaaaaggtggtcatctcggtaatggtgggaaaaaacgtcaagaagttcttaactttcgtagaagacgagcccgatttccaaggtgggcctataccgtctaagtatctcatacctaagaagatcaacttgatggtatacaccttatttcaggtccacacattgaagtttaaccgaaaggactacgacacgttatcattgttctatctaaataggggctattacaacgaactatcttttagggtcttggaacgctgtcacgagattgcgtcggcaaggccaaatgactctagcacgatgaggacattcacagacttcgtgtctggtgcacctatcgtgcgatccttgcaaaagtcgaccattcgcaagtacgggtataacttagcaccttatatgtttcttctacttcatgtggatgaattgtcgattttctctgcgtatcaagcttcactaccgggggaaaagaaggttgatacagagcgtttaaagcgggacctatgtcctcgtaaacccattgagattaagtacttttcccaaatatgcaacgatatgatgaataagaaagaccggcttggtgacatcttacacataatattacgtgcttgtgcgttaaactttggggcgggtcctagggggggtgccggagacgaagaggatcgttcgatcacaaatgaagagccgatcataccatcggttgacgaacacgggcttaaagtttgcaaactcaggtctccgaacaccccgcgccggctacgtaagactctcgacgctgttaaagcactccttgtctcctcttgcgcctgtacggcaagggatctggatatcttcgatgacaataatggggtcgctatgtggaagtggatcaagatattgtatcatgaggttgctcaagaaacaaccctcaaggactcttaccgtattacacttgtgccgtcgtccgatgggatctcgcttctggcctttgcggggccccaaagaaatgtatatgtcgatgataccacaagaagaatacagttgtacacggattacaataagaatggtagctctgaaccccgcttaaagacattagacggattaacatcggattacgtattctacttcgttacagtactgcgtcagatgcagatatgcgcattgggcaattcttacgatgcctttaaccacgacccttggatggatgttgtgggctttgaagatccaaaccaagttacgaatagagacatatctcggattgtactttactcttacatgtttcttaacacggcaaaaggatgcctggtcgagtatgcaacattccggcagtacatgagggaattgcccaagaatgcgccacagaaacttaatttccgcgagatgagacagggtctaatagcactgggccggcactgtgtggggtcacgctttgaaacggacttgtacgaaagtgcgacctctgagctaatggcaaatcacagtgtacaaaccggacgtaacatatatggagtggactcttttagcctaacatcggtctccggtacgacggccacacttctccaggaacgagctagcgagaggtggattcaatggcttggattggaatcggattaccattgttcgttttcaagtactaggaacgcggaggacgtggtggcaggggaagcagcgtcttctaatcaccaccagaagatcagccgggtgactcgcaagcggccgagggagccaaaaagcacaaatgacatattagtggcaggtcagaagcttttcggctcttccttcgagtttcgagatctacaccaactcagactgtgttacgagatatatatggccgacacccccagtgtggctgtccaggctcccccaggctatggaaagacggaactgttccacttgcctctcattgcgttggcttcgaaaggagatgtcgagtatgtctcatttctctttgtcccgtacaccgtcttgttggcgaattgcatgattcggcttggaaggtgtggatgcctcaacgttgctcctgtgcgcaactttattgaggaggggtatgatggcgtaactgatttgtatgtggggatttatgacgacctggcttccacgaattttacggaccgcattgccgcttgggaaaatattgttgagtgtacattccgtacaaataacgtgaaattagggtatctaattgtcgatgaattccacaacttcgaaacagaagtgtacaggcaatcacagtttgggggcatcactaacctagattttgatgcatttgaaaaggcaattttcctatcggggaccgccccagaagctgtcgcagatgctgcgcttcaacgcataggactcacagggctagcgaagaagagtatggatattaacgaattaaagcgatcggaagacctgtcaagggggttgtcctcttacccgacgcgcatgtttaatctaattaaggaaaaaagtgaagttcctttaggccatgtacacaaaataaggaagaaggttgaatcgcagccagaggaggctctgaagttactccttgcgctattcgagagcgaaccagagagcaaagccatagtagtggcgtcaacaacgaatgaagtcgaagagttggcatgcagttggcgaaaatattttagggtagtgtggatacatggtaagttgggtgcagcagagaaagtgtctaggacaaaggaatttgtaacagatggttcaatgcaagtactgatcggaacaaagcttgtaacagaggggattgacataaagcaactcatgatggtcataatgttagacaaccgattgaacatcattgaattaatccagggtgtaggacgactccgggacgggggactttgctaccttttgagtcgtaagaatagctgggcagctcgtaatcgaaagggagagttacccccgataaaggagggctgtattacggaacaagttagggagttctatggcctagaatctaagaagggcaaaaaaggtcagcacgtggggtgctgcgggtccagaactgacctgtcagcggacaccgtagagcttatcgaacgaatggaccgacttgcagagaagcaagccacggcgagtatgagtatcgttgccctcccttcatctttccaggagagtaatagtagtgaccgttaccggaaatattgttccagtgatgaggattccaacacgtgtatccacggatccgcaaacgcctcaacaaatgccagtacaaatgctattactacggcctcaacaaacgtgcgaactaacgcaacaacaaatgcatctacaaacgcgactacgaacgctagcacaaacgcctcgaccaacgccacgaccaacgcttccaccaacgcaactaccaattcttccacaaacgcgactactactgctagcactaatgttcgcactagtgcaacaactacggcttcgattaatgtcaggacgagtgcaaccacgacggaatctacgaactcctctacgaacgctacgactacagagtctaccaattctagcaccaatgcaacaactacagagagtaccaatagcaacacgagcgctactacaaccgcgtcaatcaatgttcgaactagtgctaccacgacggaatccaccaattccagtacatcagcaactacgactgcttctatcaacgtaagaacttcagccactacgacgaagtccatcaatagtagtacgaacgctacaacgaccgagagcaccaactccaacaccaacgctacgaccaccgaaagcactaattcaagcactaacgctacgacaaccgaatccacaaactcatcaaccaatgcgacaacaactgaatccactaatagcaacacaagcgctgccaccaccgaaagtacaaactcgaacacatcggctactaccacggaatccaccaacgcgtccgccaaggaggacgcgaacaaggacggcaacgctgaggacaatcgattccatccggttacagacatcaataaagagagttataaaagaaaaggatcacaaatggttcttcttgagcggaagaaattaaaggctcaattccccaacaccagcgaaaatatgaatgtcctgcaattcctgggattcagatcagacgaaataaagcatctttttctgtacgggatcgacatttacttctgtcctgaaggggtttttacacaatacggactctgcaaaggctgccagaagatgttcgaattgtgcgtgtgttgggcaggacaaaaggtgagctatcgccgtattgcatgggaggctcttgccgtggaacgaatgctgcgcaatgatgaagagtacaaggaatacttagaggacattgaaccatatcatggagatcctgttgggtacctaaaatatttcagcgttaaaaggcgggaaatctactctcaaattcagcggaactacgcttggtatttggcaatcacacggaggcgcgaaacgatctctgtcttagactcgactagggggaagcagggaagtcaggtgttccggatgtccggtagacaaatcaaagagttgtatttcaaagtctggtcgaaccttagagaatcaaagactgaggtcctccagtactttttaaactgggatgaaaaaaagtgccaggaagagtgggaagccaaggacgatactgttgttgtcgaagcgttagaaaagggaggtgtttttcaacgtttacgttcaatgacgagtgcggggcttcagggtcctcagtacgtcaagctgcaattcagtcggcaccataggcaattaagatcaaggtacgaattatctcttgggatgcacttgcgagaccagattgctctaggggtcaccccttcaaaagttccgcattggactgcgtttctaagcatgctcatcgggctcttctacaacaagacatttcgtcaaaaactagaatacctattggaacagatttctgaagtctggctccttccgcactggcttgaccttgcaaacgtcgaggttttggcagcagacgacactagggtccccctttatatgctcatggtggcggtacacaaagagctagactcggatgacgttcccgacgggaggttcgacattttgctttgcagggattcgtcccgagaggtgggagaataa

SEQ ID NO: 5255 - DNA, 2049 bp, Artificial Sequence
  Optimized genes for Saccharomyces cerevisiae
atgttcttcaacagactgtctgcaggcaaattgttagtgcccttgtccgtagtgttgtacgctttgttcgtcgtaattctaccgttgcagaacagctttcactcatctaatgtactagtccgtggggcggacgacgttgagaactatgggacagtgattgggatagacttgggaaccacctactcatgcgtagccgtgatgaaaaacgggaagacggagatattggccaatgagcaaggcaatagaataactcctagttacgtggctttcaccgacgacgagagattgataggcgacgccgcgaagaaccaagtagcagccaacccccaaaataccatctttgacattaaaagacttatcggactaaaatataacgaccgctcagtacaaaaagacataaagcacttgccgtttaacgtggtcaacaaagatggtaagcccgcggtagaggtctccgtaaaaggggagaagaaggtgtttaccccagaagagataagtgggatgatactagggaaaatgaagcagatagccgaggattatctaggaactaaagtcacgcacgctgttgttaccgtgccggcatacttcaatgacgctcaacgacaagccacgaaagatgccggcacaatcgcagggctaaacgttctcagaatagtaaatgagcctacggcggcagcaattgcgtatggtttagataaatccgataaggagcatcagatcatcgtctacgacctgggtggcgggaccttcgatgtgagtctcctgtcgattgaaaatggagtttttgaagtacaggcgacatcaggagatacacatttaggcggagaagactttgactataaaatcgttcgtcaactaatcaaggcttttaaaaaaaagcacgggatcgacgtgtctgataataacaaggctctggcgaagcttaaaagagaagccgaaaaagctaaacgagctcttagttcacaaatgtcgacccggatagaaatcgactcattcgtcgacgggatcgatctttcagaaacgctaacaagagccaaatttgaggagttaaatttggacttgtttaagaagactctcaagcctgtcgaaaaggtcttacaagattcagggctggagaagaaagacgtagatgatattgtcctggtaggtggatcgactcggatacccaaagttcaacagctactcgaaagttattttgacggcaaaaaagcctcgaaaggcatcaaccccgatgaagccgtcgcgtatggcgcggccgtgcaggcgggcgttttatctggagaagagggcgttgaggacatcgtgctattggatgtcaatgcccttacactaggtatagagaccacagggggcgtcatgacacccttaattaagagaaatacagcaatccctactaagaaatctcagatcttctctacggcagtcgataaccagcctacggtgatgattaaggtgtatgagggagaaagggcaatgagcaaggataataatctgcttggcaagtttgagctaaccggtataccccctgcccctagaggcgtcccccagatcgaggttaccttcgctttagacgcgaacgggatcctgaaagtctctgccaccgacaagggcacaggcaagagcgaatccattactatcaccaatgacaaaggtagacttacccaagaggagattgaccgtatggtagaggaggcagaaaagttcgcctcggaagacgcgtcaatcaaggcgaaagtggaaagtcgaaataaactggagaactacgcgcactcattaaagaaccaggtcaatggagatcttggcgagaagttggaagaagaggacaaagagactctgttagatgcagcaaacgatgtgttagaatggcttgatgataactttgagacagccatagcggaggattttgatgaaaagttcgagtctttgtccaaggttgcatatccgatcacttcgaagttgtacggaggagctgatggttcaggcgctgctgactatgacgatgaggacgaggatgacgatggcgattattttgagcatgatgagctctaa

SEQ ID NO: 5256 - DNA, 999 bp, Artificial Sequence
  Optimized genes for Saccharomyces cerevisiae
atgattagaattgctatcaatggcttcgggcgcataggtcggctagtcctacgattagcgctccagcgtaaagatattgaggtagtagcagtgaacgacccttttatttcgaacgattacgccgcttatatggtcaagtacgactccactcacggtcggtacaaaggaaccgtttctcacgatgacaagcacatcattatcgacggggtaaaaatagcgacgtaccaggagcgtgatcccgctaacctaccctggggcagcctaaaaatcgatgtagcagttgacagcactggggttttcaaggaattggacactgcgcaaaaacacatagacgctggggccaagaaagtcgtaataacagcgccgagtagtagtgctccaatgttcgttgtcggggtgaatcatacgaagtacacgcctgacaaaaaaatagtgagcaatgcgtcctgcaccacaaactgtctagcgcccctcgcaaaggtgattaacgatgcgttcggcatcgaagaggggctcatgactacggtacattccatgacagcgacacagaagactgtggacgggccctcgcacaaggactggagaggtggacgaacggcaagtggcaatatcatcccatctagtaccggcgcggcgaaagctgttggcaaagttttacccgaacttcagggaaaattaaccggtatggcctttagggtccccacggttgacgtatcggtagttgatctcaccgtgaaactagaaaaagaagctacttatgaccagataaaaaaggcggttaaagccgctgcagaaggacccatgaaaggtgttctgggatataccgaggacgcggtcgtttcttcggactttttgggggacacacatgcgtcgatctttgacgcatctgcggggatccagctctctccgaaatttgtaaaactcatctcatggtacgacaatgaatacggatattctgcaagagttgtcgatctcatagaatacgtagccaaggcttaa

SEQ ID NO: 5257 - DNA, 900 bp, Artificial Sequence
  Optimized genes for Saccharomyces cerevisiae
atgaaactgagcaaactatctatcttgacatccgccctagccacctcggcgctggcagctccggcggtagtaactgtcactgaacatgcgcacgaagcagccgtggtaacggtccagggtgttgtatacgtggaaaatggccaaacccgaacgacgtatgaaacactggctccagcgagtaccgcaactccgacaagcacggctacggctctcgtagcacctcccgtggcgccctcgagcgcgtctagcaactccgatgtcgtcttgtccgcgctaaaaaacctagccagtgtgtggggtaagactaccgatagtaccaccacactaacttctagcgagtcaacctcgcaaagcttggcgcaggcgaccacgacctccacccccgcagctgcttcaactacgagtacgcctgcggctaccacgacaacatcccaagcggctgcaaccagtagcgcatctagtagcgattctgacttgtcggacttcgcatcctcggttctcgcggaacataacaaaaaacgggcccttcacaaggacaccccagccttgtcatggtccgatacgctagcgtcctatgcgcaagactacgccgataattacgactgcagcggcactcttacccatagcggaggaccctacggggaaaacctcgcattaggctatgatggaccagctgcagtagacgcgtggtacaacgaaataagtaactacgacttttctaatccggggttttcttcaaacacggggcacttcacccaggtagtatggaaatcaacaactcaagtaggatgtggcatcaaaacgtgcgggggtgcatggggtgattatgtcatttgttcttatgacccggctgggaactatgaaggtgagtacgctgacaatgtcgagccactggcttaa

SEQ ID NO: 5258 - DNA, 6645 bp, Artificial Sequence
  Optimized genes for Saccharomyces cerevisiae
atggcaaccatcgctcctactgcccccattacgccgcccatggaaagcaccggtgatcgattagtcaccctagaattaaaggacggtactgtcctacagggttattcatttggagccgaaaagtctgtggccggagagctggtctttcaaactgggatggtgggatatccagagtctgtaaccgatccttcatacgagggacaaatcctagtaattacataccctcttgtgggaaattatggcgtaccggacatgcacctccgagatgaactggtcgaagagctgccaaggtacttcgaatcaaataggatacatatagcgggactagtcatttcgcactataccgacgaatattcccactatttagccaagtcttctctaggcaagtggttgcagaatgagggcattccagcggtatatggcgttgacactcgcagcttgaccaaacatctgagagacgctggaagcatgttgggccggctctcactcgaaaaatcgggatcggatagaaccattagccgatcctcatcatggaggagtgcgttcgatgtacccgaatgggtggaccctaatgtacagaacctcgtctccaaagtgtcgatcaacgaacctaaactttacgtcccaccagctgacaacaagcatatagagctgcaaactgggccggatggcaaagtgctccggattctcgcaattgatgtaggcatgaaatacaaccagatacgatgctttataaagaggggtgttgagcttaaggtagtgccttggaactatgactttacgaaagaagattatgacggtctgttcatctccaatgggcctggtgaccctagtgtgctggatgacctatctcagcggctgagcaacgtcttagaagccaaaaagactccagttttcggaatctgtctcggacaccagctcattgctcgcgcggccggtgcctccacgctgaagttaaaatttggcaaccgagggcacaacattccatgtactagtactatatccggaaggtgctatatcacttctcaaaaccacgggttcgcagtcgatgtggataccttgacgtcagggtggaagccgctgttcgttaatgctaatgatgatagcaacgaaggaatatatcattcggaattgccatacttttccgttcagttccaccccgaatcaacaccaggtccgagggacacagagttcctattcgatgtgttcatacaggccgtgaaagaattcaaatatacacaagtacttaaacctatagcgttcccggggggattactagaggataacgttaaggcgcatccgcggattgaagcaaagaaagtactcgtcttaggttccggaggacttagtattggacaagcaggcgagtttgattatagcggtagccaggcaattaaggctttaaaggaggagggaatttatacgattctcatcaatccgaacattgccactatccaaacctccaaagggctcgcggataaggtttatttcgttcccgtaaccgcggagtttgttcgtaaggttatcttacacgaacgacctgatgctatatacgtcacgttcggtggtcaaacggcgttgtcggtagggatcgccatgaaagacgagttcgaggctcttggggtgaaggttctcggcactccgatagatacaataataactaccgaggaccgggaattattctcgaacgcaatcgatgagattaacgagaagtgcgcgaaaagccaagcggctaactcggttgacgaggctcttgccgcggtgaaagagatcggattccccgtaatagtcagggcagcctatgcgcttgggggtcttggcagcgggtttgctaacaatgaaaaggagctcgtagatctgtgcaatgtagcgttcagttcctccccacaggtcttagttgaaaagagtatgaagggttggaaggaggtagagtacgaagttgttagagacgctttcgataattgtataactgtttgtaatatggagaacttcgatccgctgggcattcataccggcgattccatcgtggttgctccaagtcaaacgctttctgatgaggattacaacatgctccgaacaaccgctgtgaacgtaattaggcatttaggagtcgttggagagtgtaatattcagtacgccctaaatcctgtttcaaaggactattgtataatagaggtgaatgcgagactgtcgagaagttcagcgttagcttccaaggctacaggatacccactggcctacacggcggcaaaattgggcttgaatataccattgaatgaggtgaaaaacagcgtgacgaagtcaacatgcgcgtgctttgagccaagccttgattactgcgttgtaaagatgccacgatgggatttgaagaagttcaccagggtgtccaccgaactatctagctctatgaagagcgtcggggaggtgatgagcatcgggcggacatttgaggaagccatccaaaaggccatcagatcgacggaatacgcaaatttgggattcaacgagacagatttggacattgatattgactatgagctcaataatcctacggacatgcgtgtctttgcgatcgcgaatgcgttcgctaagaaaggctactcggtcgataaagtgtgggaaatgacacgaattgataaatggttcctgaacaaattacatgatctggtacaatttgcagagaaaatctcgagtttcgggacgaaggaggagctaccaagtctggtcctccgtcaagcaaagcagttgggattcgacgatcgccagatcgcccgttttttggacagtaatgaagtagcaattagacggctacgaaaggagtacggaatcacacctttcgtaaagcaaattgacacagtcgccgctgaattccctgcctacactaactacttgtatatgacatataatgccgacagtcatgacttatccttcgatgatcacggagttatggtcctaggtagtggggtctaccgaattgggtcttcagttgagtttgattggtgtgcggtcacggctgttcgtaccctccgcgcgaacaatataaagaccataatggtgaattataaccctgaaacagtaagcacagattatgacgaggccgaccgcttgtatttcgagactataaatctcgagagagtgctagatatctatgagatagaaaacagctcaggggttgttgtttcgatgggggggcagacatccaacaatatagctatgactcttcacagagagaatgtcaaaatattgggtacaagccctgatatgattgatagcgcggaaaacaggtataaattctcgcggatgctcgaccagataggcgttgatcagcctgcgtggaaagaactcacatcgatggatgaggcggaaagttttgccgagaaagttggctacccagtcctcgtcaggccgtcgtacgtacttagcggcgctgcaatgaatacggtctactcgaaaaacgatctcgaaagttatctgaaccaagccgtagaggtatcgcgtgactatcccgtagtgattaccaagtatattgagaatgcaaaggagatcgaaatggacgcagtcgccaggaatggcgagcttgtaatgcacgtagtgtcggagcacgttgagaacgcgggcgtgcactcaggcgacgcgactctcatagtaccacctcaggatcttgcgccggaaacagtggataggatcgtcgtcgccaccgccaagattggaaaggccctgaaaattacgggcccttataatatacagttcatcgcgaaggacaacgagataaaagtcatagagtgtaacgtgagagcttcccggagtttcccgttcataagtaaagtggtaggcgtaaatttaatcgagctagcgaccaaagcgataatgggactgccactaacgccttaccccgttgagaaattaccagatgattacgttgcagttaaggtccctcaattctcattcccgcggttagcgggtgccgaccccgtgttaggagtggaaatggcgtccacaggggaggtagcaacgttcggacactcgaaatatgaggcgtatctgaagtctctactagcaacgggattcaagctaccaaagaaaaacatactactttcaatagggtcatataaggaaaaacaagagctgctgtcctcggttcaaaaactatacaacatgggatacaagttattcgcaacctcgggtactgccgatttcctcagtgagcatgggatcgcagtacaatacctagaagtcctaaacaaagacgacgacgaccagaaatccgaatattccttgacgcaacatcttgctaataatgaaattgatctctacataaacctgccctctgccaaccgattccgcaggccagcgtcctatgtatctaaagggtacaagaccaggcgcctggcagttgattatagcgttcctctggttaccaacgtgaagtgcgcaaagctactgatagaggcaatttctcgcaatattacgttggatgtctcggaaagggacgcgcaaacaagccatcgaacgattacgttgccgggactaataaacatagcaacttatgtccctaacgcgtctcatgtcataaaaggtccggcagaactaaaggaaaccaccagactgttcctggaatccggcttcacttactgccaactaatgccacgatctattagcggtccagtcattacggacgtagcctcgctaaaagcggcaaactcagtgtcccaagacagcagttacactgacttctcatttacaatcgcgggcactgcccacaatgcgcactccgtgacgcaaagcgcgtccaaagtgactgctttgttcttaccgcttcgagagttaaagaacaaaataacggcggtggcagagcttctcaaccaatggcctacggaaaaacaagtaatcgcggaagcaaagaccgccgatcttgcatcagtacttttactcacctcgttacagaatcgatcaatacatattaccggtgtatcaaacaaggaggatctcgcgctgataatgacggttaaagcgaaggaccctcgagtaacttgtgatgtaaacatatacagtctctttatcgcccaagatgattaccctgaagctgtctttttgccaaccaaggaggaccaagagtttttttggaacaatctggactcaatagatgcttttagtgttggggcactcccggtggcgctcgctaatgtaacggggaacaaggtcgatgttggaatgggtattaaggactccctaccgttactgctcgcagctgtagaggaaggaaaattgaccatagatgacatcgtcttgcggttgcacgacaacccggcaaaaatcttcaacattccgacacaagatagtgtggtcgaaattgatctcgactattccttccggcgaaacaagaggtggagtccatttaataaggacatgaacgggggtattgaaagggtcgtttataacggagagactctcgtgttaagtggcgaactagtttctccgggagcaaaggggaaatgtattgtcaacccatctcccgcttcgatcaccgcttctgctgaactccagtcgacgtctgcgaagcgcagattctctataacagaagaggccattgctgacaacttagacgcggcggaagatgcgatacctgaacaacccttagagcaaaagctcatgtcgagcaggccccccagagaattggttgcccctggcgcaattcaaaatctaatcaggtcaaataacccctttcgcggacggcacattctcagcataaaacaatttaaaagatcggattttcacgttctttttgccgttgcccaagagctaagggcagctgtcgccagagaaggtgtactcgatctgatgaagggccacgtaatcaccactattttctttgagccaagcacccggacatgtagcagtttcatagccgcgatggaaagattgggcggccggattgtgaacgtaaaccctcttgtctcttcagtaaagaaaggcgagacgctccaagataccatccgaaccttggcgtgttactcagacgcgattgtgatgagacattcagaggaaatgtcagtccacatagcagctaagtactcgcctgttcccattataaatggaggcaacgggtcgcgggaacatccgacacaagctttcttggatttattcacgattcgcgaagagatcggtactgtcaacggtattacagtaaccttcatgggagacctgaaacatgggcgtactgtacattctctctgcagactgctaatgcactatcaagtccggatcaatctagtcagtcctcctgagcttcgactccctgaaggcctgcgcgaggagctgcggaaagcgggattactcggtgttgagtccattgaattgacgccacatattatatccaagaccgacgtactttactgcacaagagttcaagaggagcgatttaattcacccgaagaatacgctagactcaaggatacttacatagtagacaacaaaatattggcccatgccaaagaaaacatggcaataatgcacccactcccgcgcgttaacgagataaaagaagaggtagactacgatcaccgggccgcttactttcggcaaatgaagtatggactattcgtacgtatggcccttctggctatggtaatgggagttgacatgtaa

SEQ ID NO: 5259 - DNA, 264 bp, Artificial Sequence
  Optimized genes for Saccharomyces cerevisiae
atggaaaatgataaaggtcagctagtggaactgtacgtcccccgtaagtgttccgcaactaaccggatcataaaagcggacgaccatgcctcagtacaaattaatgtcgccaaagtagacgaagagggcagagctattccaggagaatatattacgtatgcgttaagcgggtacgttaggagtcgtggggagtctgatgacagtctcaaccggcttgcgcagaatgatggtcttctcaaaaatgtttggtcgtattcgagataa

SEQ ID NO: 5260 - DNA, 1188 bp, Artificial Sequence
  Optimized genes for Saccharomyces cerevisiae
atgtccgaggggatcacagatattgaagagagtcaaatacagactaactatgataaagtggtatacaagtttgatgacatggaactcgacgaaaatttgttgcggggggtcttcggatatggctttgaggaaccatccgcaattcagcaaagggcaataatgccgatcatcgaagggcacgatgtattagcccaagcacaatcaggcaccggcaaaacgggcactttctctatcgcggctttacagcgtatagacacttccgttaaggcgcctcaagcgctaatgctagctccaactcgcgagcttgctctccaaatccagaaggtagtaatggcattggcatttcacatggatatcaaagtacatgcttgcatagggggtacaagcttcgtcgaagatgcagagggccttagagacgcacaaattgtcgtcggtacaccgggtcgggtctttgataatatacagagaagacgtttcagaactgataaaattaaaatgtttattttggacgaggccgacgagatgttgagtagtggctttaaggaacagatttatcaaatattcaccttgctaccacccaccacacaggtggttctgctctcagccacaatgccaaatgacgtcctagaagtcacaactaaattcatgcgcaatcctgtgcgtatattagttaagaaggatgagctaacactggaaggaattaaacagttttacgttaatgttgaggaagaagagtacaagtatgaatgtctgacagatttgtacgacagtattagcgtcactcaagcggttattttctgcaatactcgacgtaaagtcgaggagctgacaacaaagcttcggaatgacaagttcacagtttccgcaatctactccgaccttccccaacaggagagagacaccataatgaaagagttccgatccggcagctcgagaatcctcatatcgactgatcttcttgccaggggtatagacgtccagcaagttagtctcgtaatcaattatgacttgcccgcaaacaaagaaaactacatacatagaatcggacgcggcggtagatttgggcgcaagggcgtcgcgataaatttcgttacgaatgaagatgtcggcgcaatgcgagagttagagaagttctattcgactcaaattgaggaattgccatccgatattgcgacattgttgaattaa

SEQ ID NO: 5261 - DNA, 402 bp, Artificial Sequence
  Optimized genes for Saccharomyces cerevisiae
atggacagggatcatattaatgatcacgaccatcgcatgagttattcaataaacaaggacgacttacttctaatggtccttgcagttttcataccgccggttgccgtgtggaagcgaaaagggatgttcaatcgtgataccctattaaacttacttctgtttttgttactcttcttccccgcaatcatacacgcatgttatgtagtatatgaaacgagctccgagagatcatacgatcttagtcgtcgtcacgccaccgcccctgccgtcgacagggacctggaagctcaccccgccgaggaaagtcaagcccaacccccagcttacgatgaggacgacgaggcaggggcagacgtacctctcatggacaacaagcagcaactgagcagtggacggacctaa

SEQ ID NO: 5262 - DNA, 555 bp, Artificial Sequence
  Optimized genes for Saccharomyces cerevisiae
atggcacgttacggtgccacttcgacgaatcctgctaagtcggcttcagcacgcggtagttacctgcgtgtttcattcaagaatacgcgagagacagctcaagccattaacgggtgggagctgactaaagcacaaaaatatttagatcaagtattggaccatcagcgggctattccctttaggagattcaactcaagtattggcagaacagcccagggaaaagagttcggggtgacaaaagcccggtggccggccaaaagtgtaaagttcgtgcagggcctcctacaaaatgcagccgccaatgcggaagcgaagggtctcgatgcgaccaaattatacgtttctcacatacaagttaatcaagctccaaaacagcgacgacgtacgtaccgggcccacggtcgcattaacaagtatgagtcgtcgccatcgcatatagagttagttgtcacggaaaaggaggaggctgtggctaaagcagctgagaagaaggttgttcgattgacgagccgccagcgcggacggatagcagcgcagaaacgcatttctgcttag

SEQ ID NO: 5263 - DNA, 156 bp, Artificial Sequence
  Optimized genes for Saccharomyces cerevisiae
atggccgctcaaaaatccttccggatcaaacaaaagatggctaaagctaaaaagcaaaaccgacccttgccacaatggatccggttacggacgaataacacgattcgctacaacgccaagcggcgtaactggaggagaacaaaaatgaatatttaa

SEQ ID NO: 5264 - DNA, 393 bp, Artificial Sequence
  Optimized genes for Saccharomyces cerevisiae
atgacacgaagttcagttctggcggatgccttgaacgccattaacaacgcagagaaaacgggtaaacggcaagtcttgattcgaccgtcctcgaaggttatcatcaaatttctgcaggtgatgcaaaagcacggttatattggcgaatttgaatatatcgacgatcaccggtcgggtaagatagttgtgcaactcaacgggcggttaaacaagtgtggggttatttctccacgatttaatgtaaaaattggtgacatcgagaagtggacagcaaatctacttcccgcgaggcaattcggatacgtcattttgacaaccagcgccggaattatggaccacgaggaagctcgcaggaagcacgtctcaggaaaaatccttggcttcgtttactga

SEQ ID NO: 5265 - DNA, 999 bp, Artificial Sequence
  Optimized genes for Saccharomyces cerevisiae
atggtgcgagttgccattaatggctttggccggatcgggagactggtaatgcgaatcgctcttcagcgtaaaaacgttgaagttgtagcgctgaacgacccctttatttcgaatgactatagcgcttacatgtttaaatacgatagtacccatgggaggtacgcaggagaggtctcccacgacgataaacatatcattgtggacggtcacaagatagctacgtttcaggaacgcgatcccgccaatctgccgtgggcgtccttaaatattgacatagcaatcgattcgacgggcgtcttcaaagaattagacacagctcagaagcacatagacgcgggagctaaaaaggtagtgataaccgctccgtcatcaacagctccaatgtttgtaatgggcgtcaacgaagagaagtacacctcagacctaaagatcgttagtaacgcatcttgcacaacgaactgccttgcccctctagccaaggtgataaatgacgccttcggaattgaagaagggttaatgaccacggttcatagtatgactgccactcaaaaaacagttgatggcccgtctcacaaagactggagaggggggcgcacagccagcggaaatataatcccctctagcacaggcgcggcgaaggcggtgggaaaggtactaccagagctacagggcaaattaactggaatggcgtttcgagtacccaccgtcgatgtaagcgtggtcgacctcacagttaagcttaataaagaaacaacgtacgatgagattaagaaggtcgtaaaagcagcagcagaaggcaagcttaaaggagttctgggctatacagaggacgcagtcgtaagtagtgatttccttggagatagcaactcctccatctttgatgctgcagcgggtatccaattgagtccaaaattcgtcaaattagtgtcttggtatgacaatgagtacggttactcaacgagggttgttgacctggttgaacacgttgctaaggcctga

SEQ ID NO: 5266 - DNA, 1758 bp, Artificial Sequence
  Optimized genes for Saccharomyces cerevisiae
atggggctcctaacaaaggtcgccacgtccaggcagtttagcacaacgcggtgcgttgctaaaaagttgaacaaatactcttatataatcactgagcctaagggtcagggggctagccaagcaatgctctatgcgactggtttcaaaaaagaagacttcaaaaagccacaagttggcgtagggtcgtgctggtggtccgggaatccgtgcaatatgcacctgttggacctaaataatcgatgttcgcagtcaatcgagaaagcgggacttaaggcaatgcagttcaacacaataggggtttcagatggcatatccatgggtacgaagggtatgagatattccttgcagtctagggagataatcgcggattcgtttgaaacaataatgatggcgcaacactatgatgccaatattgcaataccctcatgcgacaaaaacatgcccggcgtaatgatggcgatgggccggcacaatcgaccatctattatggtatacggtggtaccatattacccggacatcccacttgtggaagctctaagatatccaaaaatatagatattgtgtcggcgttccagagctatggcgaatatatctcgaaacagtttacagaggaagagcgtgaagatgtcgtggagcatgcatgcccaggcccagggtcgtgcggagggatgtacacggccaacactatggcttctgcggctgaggtgttaggcttaactatacccaactcgagctcattcccggcggtcagtaaagagaagctggccgagtgcgataatatcggggaatacattaaaaagaccatggagctggggattcttccgcgggatattcttactaaggaagcctttgaaaacgcgattacctacgtggtcgccaccggagggtcgactaatgcggtacttcacctggtcgcggtcgctcattctgcgggagttaaactatcgcctgacgattttcaacggataagtgacacgacgccattaattggcgatttcaaaccatctggaaagtacgtaatggctgatctaattaacgtcggagggacacaatctgtcataaagtatctgtatgagaacaatatgttacatgggaacacgatgaccgtcactggtgatacattagcagagagggcgaagaaagccccctccttgcctgagggccaggagatcataaagccgctgtctcatcctataaaagcaaacggccacttacaaattctttacggctcgcttgcaccgggcggggcggttggcaaaattacaggcaaagaaggcacctattttaaggggagagcccgagtgtttgaggaagaaggagcgttcattgaggcactggaaagaggtgagataaaaaagggcgaaaaaactgtagtagtcattcggtacgaaggtccccggggtgctccgggaatgcctgaaatgcttaaaccttcatcggccttaatgggatacgggcttgggaaagatgtggccctgcttacggatggtcggtttagcggaggttcgcacggcttcctaattgggcacattgtgcctgaagctgctgagggtggcccgattggtctggtgagggatggggacgagataatcattgatgccgataataataagatagatctacttgtatctgataaggagatggcgcagcgcaagcaatcatgggtagcgccaccccccagatatacacgaggtacattgagcaagtacgccaaacttgttagcaatgcatcgaatggctgcgtattggatgcttag

SEQ ID NO: 5267 - DNA, 534 bp, Artificial Sequence
  Optimized genes for Saccharomyces cerevisiae
atgtttaataccacgcccataaatatcgataagtggttgaaggagaatgaaggattgttgaagcctccagtcaataactactgcttgcataaagggggatttacagtgatgattgtagggggtccaaacgaaagaactggctatcatattaacccgactcccgaatggttttatcagaagaagggatctatgcttcttaaggtggtagacgaaactgatgcggagccaaagttcatcgacatcattattaacgaaggggatagttaccttctgcctggtaacgtgccacatagtcctgtgaggttcgccgatacggtcggtatcgtcgtggagcaagatcggcccggtggagagaacgacaagatacgctggtactgttcccactgcaggcaggtagtgcatgaatctgaactccagatgcttgacctaggcactcaagtcaaagaagcgattttggactttgaaaacgacgtggagaaacgcacgtgtttccactgcaagaccttaaattacgcccgtccacagtctaattag

SEQ ID NO: 5268 - DNA, 936 bp, Artificial Sequence
  Optimized genes for Saccharomyces cerevisiae
atgtcggtcagtgcagcgcccgctattccacaatactcggtttctgattacatgaagtttgctttggcaggagctattggttgtggttcaacgcatagctccatggtaccgatagatgttgtgaagacgaggatacaattagagccgactgtttacaacaaagggatggtcggttctttcaaacagattatagcgggcgaaggcgcgggagccctcctcacaggttttgggccaaccttactgggatactccatacagggggctttcaagttcggcggctatgaagtttttaaaaagttcttcatagataacttgggatatgatacggcctcgcggtacaagaactcggtgtacatggggagcgcggcaatggcagaattcttagccgacattgccctttgtcctcttgaggcaacacgaataagacttgtaagccagccacagttcgctaatggcttagtggggggctttagccgcatattgaaggaggaagggattggttctttctattcggggttcacacctattctattcaagcagataccatataacattgcgaagtttcttgtgtttgaacgagctagcgagttctattatggattcgccggaccaaaggagaaacttagctcgacttctaccacactccttaatctattgtcaggcttgacagccggtctagcagctgcgatcgtctcccagcctgctgacactctcctctcgaaagtcaataaaacaaagaaagcgcccggccaaagtacggtaggcctccttgcccagctagcaaagcaattgggttttttcggctctttcgctggtcttccgacgagacttgtaatggtcggtaccttgacctcgctgcaatttgggatctacggctcactgaaaagcacactgggatgccccccgactatagagataggagggggcggtcactga

SEQ ID NO: 5269 - DNA, 318 bp, Artificial Sequence
  Optimized genes for Saccharomyces cerevisiae
atggagcatcctgcatacactttatcacttctcactaccgcaggcggcctgatggggtactacaggaaagggtctatccctagtcttgtttcagggttagtattcgggagcgtctacggcatcgcagggtatcttttgcacatgaaccgggacggcggcctcgagatggcattgggggcaagcaccttacttctcggagccggagtcatacgtggcatgccttcgagattcacaaagccggtcccggtagtacttacagcactgggcggactcgggtcttactattattataacaagtacaaagagttctacccatag

SEQ ID NO: 5270 - DNA, 279 bp, Artificial Sequence
  Optimized genes for Saccharomyces cerevisiae
atggcgaaaagaaccaagaaggtggggatcaccgggaagtacggcgtacgctatgggtcatcgctccgtcggcaagttaaaaaactagagattcagcagcatgcccggtacgattgctcattttgcgggaaaaaaaccgttaaacggggagcggcaggtatttggacctgcagctgttgcaaaaagactgtcgctgggggggcctatacggtttcaaccgcggctgccgccacagtacggtcaaccatacgtcgactaagggagatggtagaagcctaa

SEQ ID NO: 5271 - DNA, 465 bp, Artificial Sequence
  Optimized genes for Saccharomyces cerevisiae
atggtacaagctgtagcagtactaaagggagatgcgggagtatcaggcgtggttaagttcgagcaagcttccgagtcagaaccaactaccgtctcctatgaaatagccgggaactcaccgaacgcagagagaggttttcacattcacgagtttggcgacgcaacgaatgggtgtgtatcagccgggccgcatttcaatccgttcaagaaaactcacggcgcgcctacggatgaggtccggcacgttggagatatgggtaacgtcaaaaccgacgaaaacggcgtggccaaggggtcctttaaagacagcctgatcaagcttatcgggccaaccagcgttgtcggtcgttctgtcgtaatacacgcggggcaggatgacctagggaagggggatacggaagagagtctaaaaaccggaaacgcggggccgcggcctgcatgcggcgtaatcggactgaccaactaa

SEQ ID NO: 5272 - DNA, 1023 bp, Artificial Sequence
  Optimized genes for Saccharomyces cerevisiae
atgactgctccgttagtggtgctgggtaacccactattagacttccaggcggatgtaacagccgaatatcttgcaaagtattcgttgaaggagaacgatgctatcctggtcgacgctaaaagcggcgacgcgaagatggctattttcgatgaattgttgcagatgcctgagactaaactcgtcgcgggcggagccgcacagaacactgctcgcggtgctgcttatgtgctaggagcaggtcaagtagtgtactttgggtccgtaggtaaagacaagttttcagagcggctcttaaacgaaaacgaaaaagctggcgtgaagtccatgtaccaggtacaaaatgatattggtacgggcaagtgtgctgctttaataacaggccataacagatcattggttacagacttgggagcggcaaatttcttcacaccagatcatctagacaagcattgggacctggtagaagctgctaaattgttttacataggtgggtttcacttaacagtatcgccagacgcgatcgtcaaacttgggcaacatgctaaagaaaacagtaaaccattcgtgttgaacttttctgctccatttatacctcacgtgtttaaggatgcgctcgccagagtattgccatatgcaactgtgataattgcaaacgaatcggaagccgaagcattttgcgatgcattccaattggactgtgcaaacaccgaccttgaagctatcgcgcaacggattgttaaggattcgcctgttgaaaagacagtgattttcacgcacggtgttgagcccacggtggtggtttcatcgaagggtacttctacctacccagttaaaccgctagattcttcaaaaattgtcgatacgaatggagcgggtgatgcattcgccgggggatttatggcaggacttactaagggagaggatttagaaacatctatagacatgggtcaatggcttgccgctctttccatccaagaggtgggtccttcgtatccgtccgaaaagataagttacagcaagtag

SEQ ID NO: 5273 - DNA, 678 bp, Artificial Sequence
  Optimized genes for Saccharomyces cerevisiae
atgagtgatacggaggctccggtcgaagtgcaagaggatttcgaagtagtcgaggaattcactcccgtggtcttggcaactcctatcccggaggaggtgcaacaagctcagactgagataaaactgttcaataaatggtcctttgaggaagttgaagtcaaagatgcttccttggtcgactacgtccaagttcgacaaccaatttttgtcgctcacactgccggcaggtatgcgaacaagcgttttaggaaggctcaatgtccaattatcgagcggctgacaaacagcttaatgatgaacgggcgtaacaacgggaagaagcttaaagcggttcgaataatcaaacatactttggacatcatcaatgtgttaaccgaccaaaaccccattcaggttgtagttgacgcgataactaatacagggccgcgggaagacactaccagagtgggaggtggcggcgctgcaaggagacaggcggtcgatgtttcgcccctaagacgggtcaatcaagccatagccctactgacgatcggggcgcgtgaagctgcctttagaaatattaagacaattgctgaaacactcgcagaagaattaatcaacgcggcaaaggggagcagtacatcttacgcgattaaaaaaaaggacgagttggagcgcgttgccaagagcaatcgttaa

SEQ ID NO: 5274 - DNA, 1080 bp, Artificial Sequence
  Optimized genes for Saccharomyces cerevisiae
atgtcgacaaaggtagtaaatgtagcggtaattggagcaggagtggttgggtcggcttttttggatcaactactggcgatgaagtcaaccataacttacaatttagtattgctcgccgaagccgagcgatcgcttatctcgaaagatttctcgcccttgaatgtcggttcagattggaaggcggcgttggcggctagcacgactaagaccctgccgctcgacgacctcatagcccacttgaaaacatcccctaaacccgtgattctggtagataacacctcctcagcctatatagctgggttttatactaagtttgtggaaaatgggatttccattgcgacaccaaataagaaggccttcagtagcgatctagccacatggaaggctctgttttctaataaaccgaccaacgggttcgtgtaccatgaagccaccgtgggcgcaggactcccgataataagttttctcagggaaatcatccagaccggcgacgaagtagagaagatagagggaatcttcagtgggacattgtcgtacatttttaacgagttctcaacgagccaagctaacgatgtaaagtttagcgacgtggtaaaagtggccaagaagctgggatacactgaacctgatccccgggacgatttaaatggactcgacgtagctcgaaaggtgactatcgtgggtcggatatcaggtgttgaggtggagtctcccactagtttccctgttcaaagcttaataccaaaacccttagaatctgtcaagagcgcggatgaatttctagagaagctatcggactacgacaaggacctaacccagcttaagaaagaggctgccactgaaaataaagtattgcgcttcatcgggaaagtggatgttgctaccaaaagcgtgtccgtcggtattgaaaaatacgattactcgcatccctttgcttcgctgaagggatccgataacgtgatttccattaaaacgaaacgttacactaatcccgtagtgatacaaggcgctggtgctggcgcagcagttacggctgctggtgtgctcggtgatgtcataaaaattgctcaacggctgtag

SEQ ID NO: 5275 - DNA, 786 bp, Artificial Sequence
  Optimized genes for Saccharomyces cerevisiae
atggctagggggccaaagaaacatcttaaaaggctagcagccccccatcactggttacttgacaaactcagcggttgctatgccccaaggccctcggccgggccccacaagctacgagaaagcttaccactcattgtatttcttcgcaatcgtcttaagtacgcgctcaatgggagagaggttaaggctattctaatgcagcgacacgtaaaagtcgatgggaaggtacgtacagacacaacctacccggcgggcttcatggacgtgattacgcttgatgcaactaacgaaaactttcgcctggtgtatgacgtcaaaggacggtttgcggttcatcgcatcacagacgaggaggccagttacaaacttggtaaagtgaaaaaggtgcagttgggtaaaaagggagtcccatacgttgttactcacgacgggcgaaccattcgctaccctgatccaaacatcaaagtgaacgacacggtaaaaatcgatttagcgtcgggaaagataactgattttatcaaatttgatgcgggcaaattagtctacgtgaccggcggccgcaaccttggccggatcggtaccattgttcacaaggagaggcacgacggcggtttcgatctcgtacacattaaagatagcctggacaacacttttgtgacgagactcaataacgtatttgtaataggcgagcagggcaagccgtacatctctttgccgaagggaaaagggatcaaactgtccatcgcggaagagagggaccgcagacgtgcgcaacagggtctgtga

SEQ ID NO: 5276 - DNA, 609 bp, Artificial Sequence
  Optimized genes for Saccharomyces cerevisiae
atggccaccaacattacctggcatcctaatctgacgtacgacgaacgtaaagccttacgtaaacaagacgggtgtactatctggcttacaggccttagcgcgtccggcaagtcaacgattgcatgcgcgctggaacagttattattacagaagaatttgtcggcttacagactcgatggcgacaatattcgttttggcttaaacaaggacttaggtttttcagagaaagaccgaaacgaaaacataagacggatatccgaagtctccaagttatttgctgactcctgcgctatttcgatcaccagctttatctctccttatcgtgtcgatagagatagagctcgagagttacacaaggaagctggactaaagtttatagagatatttgtcgacgtcccactcgaagtcgcggaacaacgcgatcctaagggattatataagaaggctcgtgaaggtgttatcaaagagtttactggcatctctgcgccttacgaggcaccgaaagctccggaactgcacctccggacggaccaaaaaacagttgaggagtgcgctacaataatctacgaatatttgatctccgagaagattatacgaaaacacctttga

SEQ ID NO: 5277 - DNA, 417 bp, Artificial Sequence
  Optimized genes for Saccharomyces cerevisiae
atgtccacagactcgatcgttaaagcgtcgaactggcggcttgttgaagttgggagggtggtactcatcaagaaaggccaaagtgcggggaaattggcggcgattgtcgaaatcatagaccagaagaaggttctcatagatggcccgaaggcaggagtcccaaggcaagcaattaacctcgggcaagttgtgctgacgccacttaccttcgcattaccgcgaggtgcccgtacagccaccgtatccaaaaaatgggctgccgcggccgtttgcgagaagtgggctgccagttcatgggctaagaagattgcacaaagagagcgtagggccgcgcttacggatttcgagcgtttccaggtgatggtactacgcaagcaaaaacgctacacggtcaaaaaagccttggctaaggcctaa

SEQ ID NO: 5278 - DNA, 504 bp, Artificial Sequence
  Optimized genes for Saccharomyces cerevisiae
atgattatttacaaagacatctttagtaatgacgaattactttccgatgcgtacgatgctaagttggtcgatgatgttatatatgaagctgactgcgctatggtaaatgtgggaggcgacaacatagatatcggagctaatccttccgcggaagggggggatgacgacgtcgaagagggcgccgaaatggtaaataacgttgtgcattcgttccggcttcagcagacagcctttgacaagaagtcattcttgacgtacataaaaggttacatgaaggctgtaaaagctaagttgcaagaaacaaatcccgaagaagtgcccaagttcgagaagggggcccagacgtatgtaaaaaaggtgatcggaagctttaaagattgggagttcttcactggagaaagcatggacccggacgccatggtggttatgttgaattatagggaagatgggaccacgccttttgtggcaatatggaaacatggtatagtagaagaaaagatctaa

SEQ ID NO: 5279 - DNA, 1080 bp, Artificial Sequence
  Optimized genes for Saccharomyces cerevisiae
atgggcgtagagcagatcctaaagcggaagactggggtaatagtgggagaagatgtgcataatctattcacgtatgccaaggaacacaaatttgccatacccgccatcaatgtcacctccagctcgactgccgttgccgcactagaggcggcacgagactctaaatctcccattatcctgcagacttccaacggtggggcagcgtatttcgccggcaagggcatatctaatgagggtcagaacgcttccataaaaggggcgatagcagccgctcactatatacggagtattgcacctgcatacgggattcccgttgtgttacattcggaccattgcgctaagaaacttctgccctggtttgatggcatgttagaagcggatgaagcctactttaaagagcacggggagcctcttttcagttctcatatgctcgacctttcagaagaaactgacgaagagaatataagtacgtgcgtgaaatatttcaagagaatggcagctatggaccagtggctcgaaatggaaatcggtattacgggtggcgaagaggacggggtgaataacgagaatgctgataaagaagatctatacacgaagcccgaacaagtctataacgtatacaaggcgctccaccctatatctcccaacttttccatcgcggcagccttcggaaattgtcatgggctatacgcaggcgacatcgccttacgccccgaaattttggcagagcatcagaagtacacgagggagcaagtcggttgtaaagaagagaaaccactattcttagtgttccacgggggctccggtagcacggttcaggaatttcatacaggtattgataacggcgttgtaaaggtcaatttagacacagactgtcagtacgcttacctaacagggatccgggattatgtactcaataaaaaggactatataatgtccccggttggcaatccggaaggtccagagaagccaaataaaaaatttttcgaccctcgtgtttgggttcgagagggggaaaagactatgggggctaaaatcacgaagtctttggagaccttcagaacaaccaacaccctatag

SEQ ID NO: 5280 - DNA, 1005 bp, Artificial Sequence
  Optimized genes for Saccharomyces cerevisiae
atgctttctcgcgtggcgaagcgtgcattttcctctacagttgctaacccatataaggtcactgtcctcggggccgggggagggatcggacaacccctgagcctacttctgaaattaaatcacaaggtaactgatttgcgattatatgatctgaaaggggcgaagggagtcgctacggacctttcgcacatacctacgaatagcgtggtaaagggtttcacccctgaagaaccagacggcttaaataacgcgctaaaagacactgatatggtgctaatccccgctggggttccgcgaaaaccaggtatgacccgcgacgaccttttcgccattaacgcgtccattgtccgagacttagccgctgcaaccgctgaatcggcaccgaacgcagcaattttagtcatatcaaatcctgtgaattcaactgttccaatcgtagcccaagtactcaaaaataagggtgtatacaacccaaaaaagttattcggcgtaacaactctagattcgataagggcggcgaggtttatctccgaagtggagaacacggacccgacgcaggagcgggtgaatgttattggggggcacagtggcattacaatcataccccttatcagtcaaacgaatcataagctaatgtcagatgataaacgccacgaactgatacatcgtatccagttcggaggggatgaagtcgttaaggctaaaaacggtgctggcagcgcgactttaagcatggcacacgcgggagctaagtttgcgaacgctgttctttcgggatttaaaggagaacgtgatgtaatagaaccaagtttcgtggactcacccctgttcaaatccgagggtatagaattctttgcttccccggtcaccttaggtcccgatggaatcgagaaaatacatcctattggagagctatcctccgaagaggaagagatgctccagaaatgcaaagagactctgaaaaagaacatcgaaaaaggcgtgaattttgttgctagtaaataa

SEQ ID NO: 5281 - DNA, 597 bp, Artificial Sequence
  Optimized genes for Saccharomyces cerevisiae
atgagtgcaatgatggtgaagttggggcttaacaagtcggctcttttgttgaaacccagcgctttctcgcgggctgctgccctttcgtcttctcgcagattgttgttcaacaccgcacgtaccaatttcttaagtactagtccgttgaagaacgtggcctcggagatgaatacgaaggcagcaatcgccgaggagcaaattctcaataaacaacgagcgaaaaggccaatctcccctcaccttactatctaccagccccagcttacatggtatttaagctcactgcatcgaatctcgcttgtactaatgggcttgggtttctatctctttactatattgttcggcgttagcggcctactcggactgggactcaccacggaaaaagtttcaaattggtaccatcaaaaatttagtaaaattaccgaatggtcaatcaaggggtccttcgcctatctatttgccatccattacgggggagcgatacgtcacctgatttgggacaccgcaaaagagctcactctgaagggagtatatcggacgggttacgcattgatcgggtttacggcagtgttaggcacgtatttactcacgttataa

SEQ ID NO: 5282 - DNA, 744 bp, Artificial Sequence
  Optimized genes for Saccharomyces cerevisiae
atgcctaagttggtcttagttcgccacggccaatctgagtggaatgaaaagaatctattcactggctgggttgatgtaaaactaagcgccaagggtcagcaggaggctgctcgagccggggaactactgaaggaaaagaaggtatacccggacgtgctatatacttccaagttgtctcgagcaatacaaacggccaatatcgcgttagaaaaggccgaccgtttgtggataccagtaaaccgatcatggcgtctaaacgaacgccactacggagacctgcagggcaaggacaaggcggagacactcaaaaaattcggtgaggaaaagttcaatacgtatcgacgaagctttgatgtgcctccgccgcccattgatgcaagctctcccttttcccaaaaaggagacgagcgatacaagtatgtcgacccaaacgtcctgcccgagacagagagcctcgcgctggtaattgatcgcctccttccttactggcaggatgtaatagcgaaggatttactctccggcaaaacggttatgatagcggcccacggaaacagtttacgaggtctggtaaaacaccttgaagggataagtgatgcggatatagcaaagctcaacattcctactggaatcccgttggtgtttgagctcgatgagaatttgaagccaagtaagccttcatattacttagacccggaggcggcggctgcgggcgctgctgcagtagcgaatcagggtaaaaaataa

SEQ ID NO: 5283 - DNA, 249 bp, Artificial Sequence
  Optimized genes for Saccharomyces cerevisiae
atggtcctcgtacaggatttactgcaccctacagcagcctcagaagcacgtaagcataaactcaaaaccttggtgcaaggcccacgctcgtattttctcgacgtaaagtgtcctggctgtcttaatatcaccacagttttctcccatgcccaaaccgccgtaacatgcgaatcttgctcgactatactttgtactccaacggggggtaaagcgaaattatctgagggtaccagttttcgcagaaagtga

SEQ ID NO: 5284 - DNA, 1026 bp, Artificial Sequence
  Optimized genes for Saccharomyces cerevisiae
atgcagtacaaaaagagtttggtagcatcggcactggttgctactagcttggcggcctacgcgccgaaagatccgtggagcacgttgaccccctccgcaacatataaggggggcattactgactattctagcacattcgggatagcagtagagcctatagcgaccacagcgtcgtccaaagctaagagagcggcggcaatttctcagatcggcgacggacagattcaggctacaacgaaaaccacggccgcagcggttagccaaatcggggacggacaaattcaggcaacgactaaaactaaagcagcagccgtatcacaaattggcgacggacaaattcaggccactactaaaacgacctcagcgaagactacggcagctgcggtaagtcagatcggcgacggccagatccaggccacgacgaagacgaaagccgcggcggtgtctcagatcggcgacgggcaaatccaagccacaaccaaaaccacggcagctgctgtgtctcaaataggtgacggacagattcaggctactacgaagactacggccgccgcggtttctcaaatcggtgatggacaaattcaggccacgaccaacaccaccgtagcgccagtatcgcagattacggacgggcaaatccaagcgacaaccttaactagcgccactataattccctcgccagcccccgctccaataactaatggcactgatcccgtaacagcggagacgtgcaagagttccggtacacttgagatgaacctcaagggtggcattttaactgacggtaaaggaaggatcggatcaatcgtggctaaccggcaattccaattcgatggacccccaccacaggcgggtgccatatacgccgcgggatggagcataacaccagagggaaatcttgcaattggggatcaagacaccttttaccaatgcttaagtggcaatttctacaatctctacgatgaacacataggtacccagtgcaacgcggtacacctccaagcaatcgacctgttgaattgctga

SEQ ID NO: 5285 - DNA, 555 bp, Artificial Sequence
  Optimized genes for Saccharomyces cerevisiae
atggctaggtacggggcaactagtactaatcccgccaaatcggccagcgcgcgtggcagttatcttagagtatccttcaaaaacacacgtgagacagcccaagccatcaacggatgggagttaacgaaagctcagaaatatctggaacaagttcttgaccaccaacgggcaataccttttagaaggtttaactctagcataggtcgcacagctcaaggaaaagaattcggggtgactaaagcgagatggcctgctaagagcgttaagtttgtgcaaggccttctgcagaatgccgctgcgaatgcggaagcaaaaggcctcgacgcgaccaaactttatgttagccatatccaagttaaccaggcccccaaacaacgtcgtcgcacctaccgggcacatggacgcataaataaatacgaatccagtcccagccacattgagttggtggtgacagagaaggaagaggcggtcgcgaaggccgcagaaaaaaaagtggtcagattgacatcccgtcaacgcggacgaattgcagctcaaaaaaggattgccgcgtga

SEQ ID NO: 5286 - DNA, 1284 bp, Artificial Sequence
  Optimized genes for Saccharomyces cerevisiae
atgagaaagtgtaagatcttcgtcggaaatagtcaccctgaactaggcaatatggtttgccaacgcttgggaatcgaaccagctccttgcaccctaaaaaaatttgctaacggggagacctcggtgcaaataggagtaagtgtaagggatgaagatgtttacgtgattcagtctgggagtccgagcatcaacgatgatatcatggagttattaattctggtctccgcctgtagaggaggttcagcaagaaaaatcactgcggttatcccgcaatttccatattccaagcagtgtaagatgaagaggcacagaggagccataacagctcgcatgcttgcaaacctactagtgatggcaggcgctgatcacgtcgtatccatggaccttcatgcatcgcagatgcagggctttttcaccaaacctgtagataatttgtatggtggaccttcattagccaaatggattcgtgagaatgtagaggattacgaagacgcggtggtggttagcaaaaacccgggtggcaccaagcgtgttacagcgctggccgatagtttgaagataaatttcgccatgattcacacggaccgcaggcggtcgaaagatctctactcacaaaataaggatctgcaacagttgaaactacgaaagcagagcatgcttcgaaagaatcggccgataattaggcaaggagatcatcctaatgaggaagaaaatatcattctatcaaatggtattcaaactgcacggataagaaacgggcacgttataggtgatgacgaagccgacgacgacgaggatgccattctcgagtcggactcggagctgcattcaatcgacggactcgactctcacggcctaggcgggacgtacgacgctgttgattccgaggacgaagaggagatcccggttctttacagggaacagttaataacccttgtaggcaacgtcagggggagatccgcgatcatccttgatgatatgatcgaccgcccggggtcattcattagcgcggctgagcacctcgtccaaaactgtggcgccaagaaagtttatgttgttgcaacacatggtatcttcaccggggactgtttggaagagctggaaaagagtgatgcgattgacactattgttgtaacaaatacttatcctatttctggtgaacgcattgcgggttctaagaagttagtgaccattgatgtctcacctatatttgcggaatgcattcgacgtgaccattatggtgaatccatctcagttctattcgattcgttggcagcgctctga

SEQ ID NO: 5287 - DNA, 1098 bp, Artificial Sequence
  Optimized genes for Saccharomyces cerevisiae
atgaaactgtcggccctcttagctctgtcggcaagtaccgcggttttggcagctcctgcggtccatcatagcgacaaccaccatcataacgataagcgggccgtggtaaccgtaacacagtatgtaaacgctgacggcgccgttgtcataccagcggcaactactgcgacttccgcagcggccgacgggaaggttgagtcagtagctgctgcgacaacaacgctcagcagcaccgctgccgcggctactacttctgctgcggcctcgagctcctcttcgagcagctctagcagttcctcgtcctcgtcagtcggaagtggtgacttcgaggatggtaccataagctgctcagacttccctagtgggcaaggtgcagttagtctggattggcttggtctggggggatgggcgagtataatggatatgaatggtaacacggcaacgagttgccaggatggttactattgtagctacgcgtgttctccaggatacgcaaagacgcaatggccaagcgaacagccaagcgatggaagatctgtgggcgggctctactgcaagaacggcaaattgtatcgcagcaatactgatactaactccctctgcgtcgaaggccaaggttcagctcaggccgttaataaggtctcaggttcaatcgctatctgtgggacggactacccagggtctgagaatatggtagtgcccacagttgtgggggcagggagctcacaacccattaatgtgataaaagaagactcgtactaccagtggcaaggtaagaagaccagcgcccaatactacgttaataacgccggggtctctgtcgaagatggttgcatctgggggacagaaggatccggtgtgggaaattgggccccggtcgtgttgggcgctggatatactgatggtattacttacctgtcaatcatacccaatccaaataataaagaggcacctaattttaatattaagatcgttgctactgatgggtcaacggtgaacggcgcctgttcctacgaaaacggcgtatactccggatctggaagcgacggctgtacagtgagtgttaccagcgggtctgcaaactttgtattttattaa

SEQ ID NO: 5288 - DNA, 264 bp, Artificial Sequence
  Optimized genes for Saccharomyces cerevisiae
atggagaatgataaaggacaattggttgagttatatgtcccacgtaagtgtagcgcaacaaaccggataataaaggcagatgatcatgcatctgttcagatcaacgtggcgaaagtagatgaggaaggacgagcgataccaggagagtatgtgacttatgcgctcagtggatatgtcagaagtcgcggtgaatcagacgactcactgaatcgtcttgcccaaaatgatggattattgaagaatgtgtggtcatactcgcgataa

SEQ ID NO: 5289 - DNA, 1920 bp, Artificial Sequence
  Optimized genes for Saccharomyces cerevisiae
atgtctaaggctgttgggatagatctaggcacaacatatagttgtgttgcccatttttcgaatgaccgtgttgatataatagcgaatgatcagggtaatcggacaactccctcatttgttggatttacggataccgaacgtctaataggcgatgctgccaagaaccaagccgctatgaatccagcgaataccgtcttcgacgctaagcgtcttattggccgtaattttaatgatccggaggttcaaggagatatgaaacattttccctttaagctcattgacgtggatggaaagccgcaaatccaagtggagtttaagggagagacaaagaacttcacccctgagcagatcagctccatggtcctaggaaagatgaaagaaactgcggagtcctatttgggcgctaaagtaaatgacgcagtagtcacagttccagcttatttcaacgactcacaaaggcaggctacgaaagacgccggcaccatcgcaggcttgaacgtgttgcgcatcatcaacgaacctaccgctgctgctatcgcatacggtttggacaagaaaggaaaagaagaacacgtcctaatatttgacttaggtggcggaacattcgacgtgagcttactgagtatcgaagatggaattttcgaagttaaagctaccgccggtgacactcacctgggcggggaagacttcgacaacagacttgtcaaccattttattcaagaatttaagcggaagaataaaaaagatcttagtacgaaccagagggcgttgcgtcgattgcgcacggcgtgtgaacgagccaagcggacacttagctcgtctgcacaaaccagtgtcgaaattgactctctgtttgaaggaatagatttctacacctcgataactcgtgcacgtttcgaagagctttgcgcggatctttttcgatccactttggatcctgtagaaaaggtcctccgcgatgcaaaactcgataaatcgcaggttgacgagattgttctcgtgggaggttccacgaggatcccaaaagtacaaaagctagtgacggactactttaacggtaaagaaccaaatcggagcattaatccagacgaagccgtggcctatggggcagccgttcaggcagcaattttgaccggggatgaatcttccaaaacccaagaccttctgctgctcgacgtagcacctcttagtctaggaatagagaccgcaggaggagttatgaccaagcttatccctcggaattccaccataccgacgaaaaagtctgaagtattttcaacatacgcggacaaccaaccgggtgtgctaattcaggttttcgaaggcgagcgggccaagactaaagataacaatctgttagggaagttcgagctctccggtattccccctgctcccagaggggtgccacaaattgaagtgacgtttgacgtcgactccaatgggattctgaatgttagtgcggtcgagaagggcactggcaaaagcaataaaatcactatcacgaatgataaaggccgattgtccaaggaagacatagagaaaatggtcgcggaggccgaaaagtttaaggaggaggacgaaaaagaatcacaacgcatagcctccaagaaccaactggagtccatcgcatattcactaaagaacacgatctcggaggcgggagacaagctagagcaggcggataaagatgctgtcactaaaaaggccgaagagacaattgcctggcttgattcgaacactacagctacaaaggaggaattcgacgaccagctaaaagaactgcaagaggtggctaatcctattatgtcgaaattgtaccaggcgggaggagcaccagaaggtgcggctccaggaggattcccgggaggagctccgcccgcgccggaggctgaagggccgacagtagaagaagtagactaa

SEQ ID NO: 5290 - DNA, 801 bp, Artificial Sequence
  Optimized genes for Saccharomyces cerevisiae
atgctaaacgttctactgcggcggaaagctttctgtcttgttaccaaaaaggggatggctacagcgacaaccgcagctgcgactcatacacctcgactcaaaactttcaaggtgtacagatggaatcccgacgaaccctcagcaaaacctcatctccaatcgtatcaagttgatcttaatgactgcggaccaatggtacttgacgctctcctcaagattaaagatgaacaagacagcaccttaaccttcaggaggtcatgccgtgagggaatttgtggttcgtgtgccatgaacattggaggacgcaataccctcgcttgtatctgtaagatagatcagaatgaaagcaagcaattgaagatttatccgctgccccacatgttcattgtgaaagacttagtccctgatttgaccaacttttaccagcagtataaatccattcaaccttatttgcagcggagttccttccctaaggatggaacagaagtcctccaatcgattgaggacagaaagaaacttgacggtttgtacgagtgtatactgtgtgcgtgctgctcaacgtcttgcccttcgtattggtggaatcaagaacaatatctgggccccgccgttctaatgcaggcctaccgctggttaatcgatagccgcgatcaagcgacaaagactcggaaagctatgcttaataattccatgtccctctataggtgtcacacaataatgaattgcacgcgaacctgtcctaaaggcttgaaccctgggttagcaatcgctgagatcaagaagtccctagcttttgcgtaa

SEQ ID NO: 5291 - DNA, 771 bp, Artificial Sequence
  Optimized genes for Saccharomyces cerevisiae
atggcgccggggaagaaagttgcgccggccccattcggggcaaaatccaccaagagtaataaagctaagaaccccttaacccactcgactccaaagaactttggtatcgggcaggcagtgcaacccaagcgtaacttatcacggtacgttaagtggcctgagtatgtccgcctccagcgtcagaaaaaaatcctgagcatccggctaaaggttcctccgaccatcgcccagttccagtacactcttgacaggaatacagcagcggaaacgtttaagctatttaataaatacaggccggagacagcagcagaaaaaaaggaacgattaactaaagaggcagcggcaatagcagaggggaagtccaaacaagacgcttcgccgaaaccatacgccgttaagtacggcctgaaccacgtggttagccttattgaaaacaaaaaggctaaattagtgcttatcgccaatgacgtggaccccatcgagttagtagtctttttaccagccttgtgtaaaaaaatgggggtaccttatgcaattatcaagggtaaggcacgattgggcacgcttgtaaatcaaaaaaccagcgctgtagcagcattaactgaagttagggccgaagacgaagcggctcttgctaaactggtctctactatagatgccaactttgctgacaagtacgacgaggtgaaaaagcattggggcggaggtattttgggaaacaaagcacaggctaagatggataaacgtgcaaagacgtcggattcagcctag

SEQ ID NO: 5292 - DNA, 432 bp, Artificial Sequence
  Optimized genes for Saccharomyces cerevisiae
atgtcccgatcaggggttgcggtagctgatgaatcactcaccgcattcaatgacctcaagctaggcaagaaatataaattcatcttgtttggcctcaatgatgcgaaaacagagattgtcgtgaaagaaacatcgactgaccctagctatgatgctttcctcgagaagctcccggaaaatgattgtctctacgctatttacgacttcgaatacgagatcaatgggaacgagggcaaaaggtctaagatcgtcttcttcacgtggagccctgatacggcgcctgtacgttcaaaaatggtgtacgctagtagcaaggatgctcttcgtcgagcgctgaacggggtgtccacggacgtacagggcactgattttagcgaggtttcatacgactccgtgctggagagagtaagtcgaggggccgggtcccattaa

SEQ ID NO: 5293 - DNA, 3618 bp, Artificial Sequence
  Optimized genes for Saccharomyces cerevisiae
atgcgcacgttcacggattttgtatccggcgcgccgattgtaaggtccttgcaaaaaagtactatccggagatacggatataaccttgctccacatatgttccttttattgcacgttgacgaactctcaatattctccgcatatcaggcatctttgccgggtgagaaaaaggtggacaccgaacgtcttaagagagatctgtgtccgcgaaagcctattgaaataaagtacttctcccagatttgcaatgatatgatgaataagaaagatcggttgggagacgtgctcgctaccgcacaaaggatacgtagacgttataataagaatggctcttcggagccgcgcctgaagaccctcgatggactcacctcagaaagatggattcagtggctcgggctagagtctgattatcattgtagtttttcgtccaccaggaatgcagaggacgtcgtggcgggagaagccgcgtcgtccgatcatgaccagaagatcagtagggttacgagaaaacgtccccgggagccaaagtctactaatgacatcttagtggcgggtcaaaaactgttcggatcctcgttcgagtttagggacctgcatcagcttcgcctctgtcatgaaatatatatggcagatactcccagtgtagcggttcaggcacctccaggatacggtaaaaccgagctttttcacctcccccttatagctctagcctcgaagggagatgttaaatacgtatctttcctttttgtaccatacaccgttctattagctaactgtatgatacggcttgggcgttgtggatgcctcaacgtagcgccagttcggaatttcattgaggagggttgcgatggagtaaccgatctttacgttgggatatacgatgatttggcttcaaccaacttcacagataggatagcggcgtgggaaaacatagtagagtgcacttttagaacgaataatgtaaagctaggatacttaatagtcgacgaattccacaactttgagactgaagtgtacaggcagagtcagttcggagggattactaacctcgacttcgacgccttcgaaaaagccatcttcttaagcggcactgcccctgaagccgttgctgatgcggcattgcaaaggatcggtttgaccgggttggcgaagaaatcgatggatatcaacgaattgaaaagatccgaagatcttagtagaggtctttctagctatcccacccgcatgtttaacctcatcaaggagaagtccgaggtaccgctaggccacgttcataagatatggaagaaggttgaatcccagcccgaggaagctctgaagttattgttggccttgttcgaaatagaacctgaaagcaaggcaatagtagtggcgagtactactaatgaagtcgaagagttagcatgtagctggcggaaatatttcagagttgtatggatccatggaaaattgggcgctgccgagaaggtctctcgcacaaaagagttcgtaactgacggctccatgagagtcctcataggtacaaagctagtgacagaaggcatagatatcaagcagcttatgatggttattatgcttgataatagattaaacataatagagctgatacaaggagtcggtcgtttacgagatggtgggctgtgttacctattgagccgaaagaatagttgggcggccagaaatcgcaagggcgaactcccgcctatcaaagaaggttgcataacagagcaggtgcgtgagttttatgggttagagtctaaaaaaggaaagaagggacagcatgttgggtgctgcggctcacgcactgatttgagtgctgatactgttgaacttattgaacgaatggaccgattagcggaaaaacaggctacggcatccatgtctattgtcgccctcccttcgtccttccaggagtcaaacagctccgatcggtgccggaagtactgttcttcagatgaagacagtaacacgtgcatccacggttctgcaaatgcgtccaccaacgctaccaccaactcttccacaaacgcaaccacgacggcgtcaactaacgtgagaacatcggccacgacgactgcgagcataaatgtacgcacgtctgctacaaccacagagtctactaactcaagcaccaacgcaacgactacagcgtccactaacgtgcgtacatcagctacaactaccgcatccattaatgtgagaacctcggctacgaccacagaatcaacgaatagtaatacatcggccacgacaaccgagtcaacagattcgaacactagtgccacaaccacagaatcaactgactcaaacacgtcagcgaccaccacagcttctaccaacagttccaccaacgcgacgactaccgcttcgacgaactcatcgaccaacgcgacgactaccgagagtaccaacgcgtcggccaaggaagacgccaacaaggatggaaatgccgaagataatcgtttccacccagttacagatatcaacaaggagtcgtataaacgaaaaggatcacaaatggttctattggaacggaaaaaattgaaagcccagttccctaacacatcagaaaacatgaatgtactccaatttttgggttttaggtcagatgaaattaagcacttattcctgtatgggatagatatttatttctgtcctgaaggtgtattcacacaatatgggttatgcaaaggctgtcaaaagatgtttggtctctgtgtgtgttgggccggccaaaaagtgagttatcggagaatggcgtgggaagcgttggccgtggagcgcatgttacgcaacgacgaagaatataaagagtatctagaggatatcgagccctaccacggggatcctgtggggtatctgaagttctttagcgtcaagcgcggcgaaatttactctcaaatccaacgtaactatgcgtggtatttagcgattacacgcaggcgcgagactatatcggtactagactcgactcggggaaagcagggctcgcaagtgtttcgaatgtctggccgacaaattaaggaactatattataaagtgtggtcaaatctcagagagtcgaaaacggaagtccttcagtatttccttaattgggacgaaaagaagtgcagagaggagtgggaggctaaggatgacacagtgttcgttgaagcactcgaaaaagttggtgtatttcagcgtctaagatctatgacatccgcgggactccagggcccgcaatatgtcaagctacagtttagtaggcatcatcggcagttgcgatcgagatacgagctttctctgggtatgcatctgagggatcaactcgcgttgggcgttacaccgtctaaagtccctcactggaccgcattcctaagcatgcttatcggattattctataacaaaacgtttcgtcaaaagcttgagtacttgctagagcagatatcagaggtctggttgctcccccactgggtggaccttgcgaatgttgaagttctcgcagcagacaataccagagtcccgttgtacatgcttatggtggcagtacataaagagttggacagtgacgatgttccggatggtcgtttcgacataatcttgttgtgccgcgattcttctcgggaggtgggggaatga

SEQ ID NO: 5294 - DNA, 252 bp, Artificial Sequence
  Optimized genes for Saccharomyces cerevisiae
atggcggaccaggagaacagtcctctacacactgtgggttttgacgccagatttccgcaacaaaatcaaaccaaacattgctggcagtcctacgtagactatcataagtgcgtgaatatgaaaggcgaggattttgctccatgcaaggttttttggaagacttataacgcattgtgcccgctagattggattgagaaatgggatgaccaacgagagaaaggcatctttgcgggagacattaacagcgactga

SEQ ID NO: 5295 - DNA, 312 bp, Artificial Sequence
  Optimized genes for Saccharomyces cerevisiae
atggttacgcaattcaaaactgcgtcagagtttgactcggccatcgcccaagacaagctggtggtggtggatttttacgctacctggtgtggcccttgcaagatgattgccccgatgattgaaaagttctctgaacagtacccgcaggccgacttctacaagcttgatgttgatgagctgggagatgttgcccaaaaaaatgaagtctcggctatgccgactttgcttcttttcaaaaatgggaaggaagtcgctaaggttgtcggggccaatcctgcggcaatcaagcaagcgatagcagctaatgcatga

SEQ ID NO: 5296 - DNA, 1692 bp, Artificial Sequence
  Optimized genes for Saccharomyces cerevisiae
atgtcggaaatcacacttgggaaatatctgtttgagcgtctgaagcaggtcaacgtgaataccgtattcgggctcccgggtgactttaatctcagcttgttagataaaatttatgaggttgagggaatgcggtgggctggcaacgccaacgagttgaatgcagcatacgccgctgacggttatgcacggataaaaggcatgtcatgcatcataacaacgtttggagtaggagagctttccgcgcttaacggtatagcgggcagttacgcagagcatgttggtgtgctgcacgtagttggcgtaccatccatttctgctcaagcaaaacaactcctgctacaccatacgctggggaatggggatttcaccgtattccaccgtatgagcgctaatatatcggaaaccacagcgatgataacggatatcgccactgcgcccgccgagatagaccgatgcataagaaccacatatgtcacccaacgtcccgtttatctaggacttcccgcgaacctcgtcgatcttaatgtcccggcaaaactgcttcaaacgcctatcgacatgtcccttaaacccaacgatgcagagagcgaaaaggaggtcatcgatacgattctagccttagtaaaggatgcgaagaatcctgtcatcctggcagatgcatgttgtagcagacacgatgtaaaagcagagacgaagaagctgatagacctcacgcaatttcccgctttcgtgacacctatgggtaaggggagcatagatgaacaacaccctagatacggtggtgtctacgtaggaaccctcagtaagccagaggtcaaagaggcagtggaatcagcggatctcatactctcggtaggtgcactgttgagcgactttaacacgggctctttctcatacagctacaagacaaagaacatagtagaattccactctgaccacatgaaaattcgcaatgccacgtttcctggggttcagatgaagtttgtattgcaaaaactgctaactacgatagccgatgccgcaaaaggatataagccagtggctgtgccggcccggacgcccgcaaacgcggcagtgccggcttcgacccccttaaaacaagaatggatgtggaaccaactgggcaactttttgcaagaaggcgacgtggtaattgccgagacaggcacttcagccttcggaattaatcaaactacgtttcccaataatacttatgggatttcgcaagtactatggggttctattgggtttacgacaggcgccactttgggcgccgcctttgcagctgaggaaatcgatccaaagaaacgtgttatactctttataggggacggatctctgcaactaacggtgcaggaaatctctaccatgatccgttggggtttaaaaccttacctatttgttttgaacaatgatggttatactatagaaaagttaatccacgggccgaaagcacaatataacgaaatccagggatgggaccacctaagcctactacccaccttcggcgcaaaggactacgagacacaccgcgttgcgacaactggggaatgggataagctcacccaggacaagtcgtttaacgataattcaaagattcgtatgatcgaaataatgcttccagtgttcgacgcgccgcagaatctggtagagcaagctaaattaaccgcagcaacgaacgcaaaacagtaa

SEQ ID NO: 5297 - DNA, 1098 bp, Artificial Sequence
  Optimized genes for Saccharomyces cerevisiae
atggaccttgttctcgaggtcgcagaccactatgttcttgacgacctatacgcaaaggttttaccggcttcccttgccgcgaacatcccagtcaaatggcaaaaattattggggttgaattcggggttttctaatagcacgattctacaggagacactgaactcaaagaacgcggttaaggagtgtaggcgtttctatggccaggtgccctttcttttcgatatgagcactacctcgtttgcgtcactattgcccaggagttcaatcttaagggaatttctgagcctttgggttatagtaacgatcttcgggcttttgttgtacttattcactgcatcgctctcttacgtattcgtcttcgacaagagtatctttaatcacccgcggtacttgaagaaccagatggcaatggaaataaaattggccgtgtccgctatcccatggatgtcgatgttaaccgtcccctggtttgtaatggagctcaacggtcatagtaaactgtatatgaaaattgattatgagaatcatggagtgcgcaaacttattatcgaatactttactttcatctttttcacagattgtggcgtttatcttgcgcataggtggctccattggcctcgcgtttatcgagcactgcacaaaccccaccacaagtggctcgtctgcactccattcgccagtcacagttttcatccagtagatggctttttgcagagcatttcgtatcacatatatcctttgatattgccacttcataaggttagttatcttatactgtttaccttcgtaaatttctggactgtgatgattcacgatggacagtatctatcaaacaatcccgcggttaatggtaccgcctgtcatacagtgcatcatctctattttaactataattatggacagttcactaccttgtgggataggctggggggtagctatcgtcgtccagacgactcactcttcgatcctaaactcagggatgccaaagagacttgggacgcacaagttaaggaggtggaacacttcattaaagaagtggaaggcgacgacaatgatcgaatttatgagaacgaccccaatactaaaaaaaataattaa

SEQ ID NO: 5298 - DNA, 1788 bp, Artificial Sequence
  Optimized genes for Saccharomyces cerevisiae
atgcccacggttagcgttaacaaacagcaactgttcgacttgttgggtaaaaactacacaagtcaagaatttgacgaactatgtttcgagtttgggatggaaatggacgaggatactactgaggaagcattaaaaactggagaagaaccggagcttaaactagatatatcggcaaatcgatatgacttattatgtatcgagggtataagtcaaagtctgaatgagtacctggaacgcaaagaacgtccggactacaaactaagtaagccaactacaaagctcattattgataagtcaacggagcaaattaggcctttcgcaacagctgccgtcttaagaaatatcaagttaaacgaaaagtcgtatgcgagctttattgcgctccaggacaaattacatgctaatctctgtcgaaaccgctccctagtcgcgatgggaacacatgacctcgattcaatagagggaccgttccactatagggcgttgccgcctaaggatataaagtttgtgccactgaatcagactcaggagttcacgggtgataagctcatagaattctataagtcccctgaacaaaaaaacaacataggaaggtacgtccacatcatcgaggattccccagtatttccagtcataatggactctaaggatcgcgtgtgctctcttccacccttaataaactccgaacacagcaagatatcggtcaatacaaggaatatcctcatagacattacggccaccgacaaaactaaagccgagatcgtactgaacattttgactacgatgttttcaaggtactgtgacgaaccgttcactgtagagccggttgaaattgtatcggagcacaacggacagtccaggctggcgccaaatttcaacgaccgcatcatggatgtgagtatcaaatatatcaattcatgcctaggcctagatcagtctgctgatgagatcgcacactgccttaaaaagatgtcactccatgctgtgcagtcaaaggaggataaggacatcctacacgtcgatataccggtaaccaggccagatattcttcatgcttgcgatataatggaggatgctgcagtagggtatgggtttaataacttgcccaaaggcgagaaattaagcaatgcgaatttcatcgcaaaacccctgccaatcaataaagtctccgatatcttcagagtagcttcctcccaagctacatgggtggaagttcttcctttgacgttatgctctcacgatgagaatttcaaattcttgcgacaaagtgataacggagacctcgcggtgaagttggccaatccaaagacactggagtatcaggtcgtacggactacgctgctcccagggatcttgaaaaccgtcaaggaaaaccggaagcactcgctccccatcaaagtgtttgagacaggcgacgtggtgtttaaggatgacaagctggaacgtaaggcatataatgagcgacactgggccgctatttacgtggggaagaacagcggttttgaaataatacagggtttacttggcaaaattatgcaaacgttcagaaccgaatggattgctgattatggagctgcagcatccggacgggggtactggattgaggaagacgatagcgtaaaaacctatttccctggacgtggcgcgaaggtgatgtttcggtccaaagagggagctgagccaaaacagatcgggcacctcggagtcttacacccagaggtcatgatgaatttcgatgtaccgttcgcggcaagctttgtggaggtaaacgcagaggtgttcctataa

SEQ ID NO: 5299 - DNA, 366 bp, Artificial Sequence
  Optimized genes for Saccharomyces cerevisiae
atggctcccaatacatccaggaagcagaagattgcgaaaacattcaccgtagatgtaagttcgcctacagagaatggggtgtttgatccagcaagttacgcaaaatacctgatcgatcacataaaagttgagggcgctgtgggtaacctaggcaatgcggtaactgtgactgaagatggaactgtcgtcactgtcgttagcacagcaaaattttctggtaaatatctaaaatacctgacaaaaaagtatttgaaaaagaaccagttgcgggattggattcgatttgtgagcacaaaaactaatgagtatcggctggcattctaccaagtaacgccggaagaggacgaggaagaagacgaggagtag

SEQ ID NO: 5300 - DNA, 666 bp, Artificial Sequence
  Optimized genes for Saccharomyces cerevisiae
atggcgaggaggcctgcgagatgttaccgctaccagaagaacaagccgtatcctaagtcccgatacaatcgggcagtgcccgactcaaaaatccgtatatatgacttgggcaagaaaaaggcgacagtggatgagttcccactatgcgttcatctggtttccaacgaacttgagcagttatcctccgaggcccttgaagcggccaggatatgtgcgaataagtacatgacgactgtttcggggcgggatgcgtttcatctaagggtaagagtccatccgttccacgtcttacgtatcaacaagatgttgtcatgcgcgggagcagatcgattgcagcagggaatgcgcggagcatggggtaaaccccacgggctagcggcgcgggtcgatatagggcagatcatattctctgttcgaactaaggattctaacaaggacgtcgtagtcgaaggcttacgccgagcccgatacaaatttccaggccagcagaaaatcattctcagcaagaaatgggggttcacgaaccttgatagacccgagtacctgaaaaagcgcgaggctggagaagtgaaagatgatggggcgtttgtcaaatttttatcgaaaaaaggcagcctagaaaacaatattcgcgaatttccggagtatttcgccgcgcaagcatag

SEQ ID NO: 5301 - DNA, 531 bp, Artificial Sequence
  Optimized genes for Saccharomyces cerevisiae
atgtctgatctagtgaacaagaagttcccagcgggagactataagtttcaatacattgcgattagtcaatcagatgccgattcagaatcttgcaagatgccacaaacagtagagtggagtaaactaatttccgaaaacaagaaagtaattataaccggtgcgccggccgccttttcgccgacctgtacagtctcacacatacctggttacatcaactatctggacgagctcgtaaaggaaaaggaggtggatcaagtaatagttgtgactgtcgacaatccctttgctaaccaggcgtgggcgaaatctttgggtgttaaggatactactcatataaaatttgcttctgaccctgggtgtgctttcacgaaatccatagggttcgaactggcagtaggggatggtgtttattggtccggcagatgggctatggtagttgagaacggcatcgttacatatgcggccaaggagacgaatcctggtacggacgtgaccgtgagctccgttgaaagcgtgctcgctcacttatag

SEQ ID NO: 5302 - DNA, 402 bp, Artificial Sequence
  Optimized genes for Saccharomyces cerevisiae
atgcagtttagtacggtagcatcgatagctgctgtcgcagccgtggctagcgcagcggcaaatgtgacaacagcgacagtttcacaggaatcaaccacactagtaactatcacatcttgtgaagaccacgtttgctccgaaactgtcagtccggcattggttagtacagccaccgttactgttgatgacgtgattacgcagtataccacttggtgtcccttaaccaccgaggctccgaagaacggaacctctaccgcagcgccagtaacttctacggaagcgccaaaaaacactacatctgcagcacctacacactctgtgactagttacactggagctgccgccaaggctctacctgccgctggtgcattgctcgcgggcgcagctgctctcctcttatag

SEQ ID NO: 5303 - DNA, 822 bp, Artificial Sequence
  Optimized genes for Saccharomyces cerevisiae
atgtctaacccttttgacttgctgggaaacgatgtggaagacgcagatgtggtagtcctccccccaaaggaaatagttaagtctaacacgagctcgaaaaaggcagatgtacctcctccttctgcagatccatctaaggcgcgaaagaatcgacctcgaccctctggcaacgagggtgctattcgcgataagaccgccggtcgacggaacaataggtcaaaggacgttactgactcggcgacgacaaaaaagtcaaacactaggcgagcgacggacaggcactcgagaacgggaaagacggacacaaagaagaaagttaatcagggttggggcgacgataagaaggagttatctgccgagaaagaagcgcaggcagacgcggcagcggagatcgcggaggacgccgcggaagccgaagatgccggaaagccaaaaaccgcccagctctcgctccaggattatctaaaccagcaagcgaataatcaattcaacaaagtgccggaagcgaaaaaggtcgaactagatgctgagcggattgagacggcggaaaaagaagcatacgtacctgcgacaaaggttaagaatgtcaaatctaagcagttaaaaacaaaagagtacctggaatttgatgccactttcgtggagtcgaatacacggaaaaacttcggggaccgtaataacaactctcgtaataactttaacaaccggcgaggcgggagaggtgctcgtaagggaaacaacacagcaaacgctacgaactctgccaatacagtgcagaagaataggaatatcgatgtttcgaatctcccatccctggcgtga

SEQ ID NO: 5304 - DNA, 1089 bp, Artificial Sequence
  Optimized genes for Saccharomyces cerevisiae
atgcggtcgctaaatacgctgttactcagcctatttgtagcgatgtcgagcggagcccccttgcttaaaattagggaagagaagaactcttccttgccgtccataaagatttttgggacgggggggacgatcgcaagtaaagggagtacaagcgccacaaccgcaggctactcagtgggtctcacagtaaacgaccttattgaggctgtgccaagcctggccgaaaaagccaacctcgactacctccaggtatcgaacgtcggatcgaattcgttgaattatacacatctcatcccgctctaccatgggatttcagaagccctggctagcgacgactacgccggagcggtagttactcacggaacagatactatggaagaaactgccttttttctcgacctgacgatcaatagtgaaaagccagtttgcatagctggtgccatgaggccggctacggctacgtccgcagatggcccgatgaatctataccaagcggtctctatcgcagcctccgagaaatccctcgggcgtggtacaatgatcacgctaaatgaccgtatcgccagtgggttttggacgactaagatgaatgccaatagcctcgatacgttccgcgctgacgaacagggttatttggggtacttctcgaacgatgacgtcgaattttattatcccccagtcaagcccaacggatggcaattttttgatataagtaatctaacggacccgtccgagataccggaggtgataattttatattcctatcaggggctcaatcctgagctaattgtgaaggctgtcaaagatctcggtgctaaggggatagttttggcgggttctggggctgggtcctggaccgcaaccggctcgatcgttaacgagcagctatacgaggagtacggtatcccaatagttcactctcgaaggacggcggatgggaccgtccctcctgatgacgcgccagaatatgccataggttcaggctatcttaatccccaaaagtctcgaattcttctacaactttgcctctatagcggctatggaatggaccaaatacgctctgtgttttcaggggtatacggaggatga

SEQ ID NO: 5305 - DNA, 459 bp, Artificial Sequence
  Optimized genes for Saccharomyces cerevisiae
atgcaaatctttgtgaagactttaaccgggaaaacgataactctagaagtggagagttcggacactatcgacaacgtcaagagcaaaatccaggacaaggagggcatacctcctgatcaacaacgcctgatctttgcagggaagcagctagaggatggcagaacgctttcggactacaacattcagaaggaaagtactctgcaccttgtgttgcgccttagaggagggggaaagaagaggaaaaaaaaggtgtatactacaccaaagaagataaagcacaaacacaagaaggtaaaactagcggtgctctcctactataaagtcgacgcggaggggaaagtaacgaagttgagacgggaatgcagcaacccgacgtgcggtgctggggttttcctcgcaaatcacaaagaccgcttgtattgcggtaaatgccactcggtatacaaggtaaatgcctga

SEQ ID NO: 5306 - DNA, 267 bp, Artificial Sequence
  Optimized genes for Saccharomyces cerevisiae
atggggaaagggaccccctcttttggaaagcgccataataagtctcatactttatgtaatagatgtgggcgtaggtcatttcatgtacagaaaaaaacctgctcatcttgtgggtacccagctgctaaaacccggtcgtataattggggagcaaaagcaaagcgtcggcacacgactgggaccgggaggatgaggtatctaaaacacgtttcgcgtcgctttaagaatggctttcagaccggcagtgctagcaaagcctccgcctaa

SEQ ID NO: 5307 - DNA, 3135 bp, Artificial Sequence
  Optimized genes for Saccharomyces cerevisiae
atgtcggactctcagcaatctattaaggttcttgaggagcttttccaaaagctgtcggtagccacggctgacaatcgccatgaaatcgcaagcgaagtagcgtcctttttaaatgggaatatcatcgaacacgatgttccagagcactttttcggagagcttgctaaagggattaaggacaagaagacggcggcgaatgccatgcaagcggtggcccacatagcgaatcagtccaatttgtccccctccgtggagccctatatcgtgcagcttgtaccagccatatgtaccaacgccggaaacaaggataaagagattcaaagcgtagctagtgaaacattgatttccattgtaaacgctgtcaaccccgttgccatcaaggcgctccttccacacttaactaatgcaatagtagagactaacaagtggcaggaaaaaattgccatattagcagcgatttctgcaatggtagacgctgctaaagatcaggttgcgttacggatgccagagttgataccggtcttatcagaaactatgtgggacactaagaaagaagtgaaagcagcagcgactgcggcgatgacaaaagcgactgagactgtagataacaaagatatcgaaagatttattcctagtctaatccaatgcattgctgatcccacggaggtgccagaaaccgtacatctcttgggagcaaccactttcgttgctgaagttactcccgcgaccctaagcattatggttccattgctttcccgcgggcttaatgaacgagagacaggcattaagcggaaaagtgcggttataattgacaacatgtgtaagctggtcgaggacccccaggtcattgctccctttctcggcaagctccttcccgggctaaaaagcaacttcgcgacgatcgccgatccggaggctcgagaagttacgctgcgagcactcaagactctaagaagagtaggtaatgttggagaagatgacgcgatccccgaggtctctcatgcgggcgatgtgagtacgacactccaagtcgtgaacgaattgctaaaagacgaaactgtagcaccgcgctttaaaatcgtagttgaatacattgcagcgattggggcggacctcatagacgagcgaattattgatcagcaggcgtggttcacccatataaccccatacatgaccatctttctacatgaaaagaaagctaaggacatccttgatgaatttcggaaaagagcggtagacaatatcccagtaggtcctaatttcgatgatgaagaggacgaaggtgaagacttgtgcaattgcgagttttcgttggcttacggcgccaaaatcctactcaacaagacccaattgcgactgaaaagggcaaggagatacggaatctgcggacctaatgggtgcgggaagagtacgttaatgcgtgctattgcaaatggccaagtggatggtttccctactcaagaggagtgtcgtactgtttacgttgagcatgatatagatgggacacactccgatactagtgtgttagacttcgtattcgaatcgggcgtaggtacgaaagaggccatcaaagacaaactgatagaatttggatttaccgatgagatgattgcaatgcccatatcagctctaagcggtggctggaagatgaaactagcacttgctcgggcggtgctccggaacgctgacatcctgctcttagatgagcccaccaaccacctagataccgtgaatgtggcatggctagtgaattacctcaatacttgcggcataactagtatcacgattagtcacgattccgtgttcctggataacgtatgcgagtatataatcaactacgagggtttgaaattgaggaagtacaaaggcaacttcaccgagttcgtcaaaaaatgtcctgcagctaaagcttatgaggaactcagcaacacggacctcgagttcaaatttccggagcctgggtacctagaaggcgtaaaaaccaaacagaaggctattgtaaaagtgacaaatatggagtttcaatacccgggaacatcaaaaccgcagataactgatattaactttcaatgttcgcttagctcacggatagcggtaattggcccaaatggggcagggaaaagtacactaataaacgtacttaccggggagcttcttccaacgagtggtgaagtatacacccatgaaaactgccgcatcgcatacataaaacagcatgctttcgcacatatcgaaagtcacttggacaagacgccctccgagtacattcaatggcggttccaaaccggcgaggacagggaaactatggatcgtgccaaccgtcaaatcaatgagaatgatgcagaggctatgaataagatctttaaaatagagggaacaccgaggaggatcgccggcatacactcacgtagaaaattcaagaacacctatgagtatgaatgttcgtttctcctaggtgaaaacataggaatgaagagtgagcgttgggtacccatgatgtctgtggataacgcgtggattccacgtggtgagctagtagaatcacattctaaaatggtcgctgaagtagacatgaaggaggctctcgcgtcgggccaatttcggccattgacgcggaaggaaatcgaggaacactgcagcatgttgggtctggaccccgagattgtcagtcatagtcgtataagggggcttagcgggggacagaaggtaaagctcgtgctagctgcgggcacatggcaacgacctcacttaatcgtcttagacgaaccaactaattatcttgaccgggactccctcggcgccctctcaaaagctttaaaagaattcgagggcggtgtgatcataataacacatagcgccgagttcacgaaaaatcttactgaagaggtttgggcggtaaaggacggacgaatgacgccaagtgggcacaattgggtgtcggggcaaggtgcaggaccaagaattgaaaagaaggaagatgaagaggacaaatttgacgcgatgggcaacaaaatcgctggagggaagaaaaagaaaaagttgtcaagtgcggaactaaggaagaaaaagaaggagcgaatgaaaaagaagaaagagctcggagatgcctatgtttcgtccgacgaggagttctag

SEQ ID NO: 5308 - DNA, 1719 bp, Artificial Sequence
  Optimized genes for Saccharomyces cerevisiae
atgcttagaagttctgtggtaaggtcccgcgctaccctgcgccctctactgcggcgcgcttattcttctcacaaagagttaaaatttggtgtcgaaggacgggccagcctattaaagggtgttgaaacgttagctgaagccgtggcagcaaccttaggccccaaaggcaggaatgtcttaattgagcaacctttcggcccccctaaaataactaaggacggagtaacggtggccaagtctattgtactcaaagacaaatttgaaaacatgggtgcaaaactactgcaagaggtagcttcaaaaactaatgaagccgccggcgatgggacaaccagcgctacggtcttaggtcgcgcaatcttcaccgaaagtgtgaagaatgttgcagctggctgtaaccctatggacctaagacgggggagtcaagtagcagtggagaaagtaattgaattcctatctgctaacaaaaaagagataacgacaagcgaggaaatcgcccaagttgcgactatctctgcgaacggagactcccatgttggcaaactgttagctagcgcgatggaaaaggtagggaaagaaggcgtcatcactatacgggaaggccgtactctcgaggatgagctcgaggtaacagagggtatgcgattcgatcgtggattcatctcaccttattttataacagacccgaagtcctcaaaagtggaattcgaaaagcctcttttgctgttatcagagaagaaaatctcgtctatacaggacatattaccagcactagaaatctcgaatcagagccgccggccacttttaatcatagctgaggatgtagacggcgaggcgctggccgcatgcattttgaataagctccgaggtcaagtcaaggtgtgtgcagttaaggcgccgggttttggcgataatagaaaaaataccatcggggatattgctgttttgactggtggaacggttttcaccgaggagctggacctgaagcccgaacagtgtactattgagaatctggggagttgcgacagtattacagtgaccaaagaagatacagtaatactcaacggttcggggcccaaggaagcgatccaggagcgcatcgagcagataaaggggtcgatcgacataaccaccactaatagctatgagaaggaaaaacttcaggagagactggctaagctgtcaggaggagtcgccgtgatacgagtgggtggtgctagtgaggtcgaagtaggagaaaaaaaagacagatatgacgatgctctaaatgctacccgcgccgcagtcgaagagggtattctcccggggggtggaactgctcttgtaaaagcgtcgcgagttcttgacgaagtggtggtggacaatttcgatcagaagttaggcgtagacattatacgaaaggccattactaggccggccaagcaaatcatagagaatgcaggagaagaaggtagcgtcataatcggtaaattaattgacgagtacggtgacgatttcgccaaagggtatgatgcgagtaaaagtgagtatacagacatgctcgcaacaggcataatagacccattcaaggttgtccgctccggtttggtcgatgcatctggagtagcaagccttttggcaactaccgaggtagcgatagttgacgctcctgaaccgccagcagccgccggagctggtggcatgccggggggaatgccgggcatgccgggaatgatgtga

SEQ ID NO: 5309 - DNA, 204 bp, Artificial Sequence
  Optimized genes for Saccharomyces cerevisiae
atggactcaaagacgcctgttaccctagcaaaggtaattaaggtgctgggtaggaccggttcccgagggggggtaacacaggtaagagtagaatttttagaggacacctcacggacgatcgtacggaacgtgaagggtccggttagagaaaacgacattttggtattaatggaatccgagcgcgaagcaagacggctgagatga

SEQ ID NO: 5310 - DNA, 1689 bp, Artificial Sequence
  Optimized genes for Saccharomyces cerevisiae
atgtcattgctttacataatcttgcttttcacacaatttctcctgttgccgaccgacgcctttgataggagtgctaatactaacatcgctgtatactggggacagaatagcgctgggactcaagaaagcctcgctacatactgcgaatccagtgacgctgatatttttctacttagttttcttaaccagtttcctactttgggtctcaactttgcgaatgcttgctccgacaccttctcggacgggctattacactgcacacaaatagctgaggatattgaaacgtgccagagtctagggaaaaaagtgttgttgtcccttgggggtgcttcgggatcatatttgttttcagatgactcacaagcagagacctttgcccagacattatgggatacctttggcgaaggtaccggtgcatcagaacgtccttttgatagcgcagtcgtggacggattcgattttgatatcgaaaataataatgaagttggctacagcgctttagcaaccaaactaaggacattatttgccgagggaacgaagcagtactatttgagtgccgcccctcagtgtccttatccggatgctagcgtcggggacttattagaaaatgcggatatagactttgcatttattcagttctacaataattactgcagtgtcagtggacagtttaactgggacacttggcttacgtacgcgcagaccgtaagtcctaataagaatataaagctcttcctgggcttgcccggatctgcctctgccgcgggttcaggatacatatcagatacgagtctactggagtccaccatagcagacatcgcttcgtcgtctagctttgggggcatagctttgtgggatgccagtcaagcattctcaaatgagcttaatggcgaaccatatgtagagatcttgaagaatctattgacctctgctagtcagacagcgaccaccacggttgccacgagtaaaacatccgcggcttcgacgtcttccgcgtctactagctcggcttctaccagtcaaaaaaagacgacacaatccactacatccacgcaaagtaaatctaaagtcaccctatccccgactgcgtcaagtgcaatcaaaactagtattactcagactactaagaccctgactagctcgacgaaaacgaaaagttctttagggacgacaaccacggaaagtaccctaaacagcgtggccattacatcaatgaaaactacgctatcatcacagattactagtgcagcgttggtcactccccagactaccacgacgtctatagtctcctcggcccctatccaaaccgccatcacctcgactctatccccagcaaccaaaagttcgtcggtggtctccttgcagacagccacaacaagcactctctcgcctacgacgacgtccacatcgtctggaagcacatcgtcgggatctactagtagcgatagtacggcgaggactttggccaaagaacttaacgcacagtacgctgctggcaagctgaatggaaaatcaacctgcactgagggagaaatcgcgtgttcggccgacgggaagtttgcggtttgcgatcactccgcttgggtctacatggagtgcgcaagcggtacaacgtgttacgcttatgattcaggcgatagcgtgtacacacaatgcaactttagctatctagagtctaattatttttag

SEQ ID NO: 5311 - DNA, 192 bp, Artificial Sequence
  Optimized genes for Saccharomyces cerevisiae
atggctaaggtgcatggttcattagccagagcggggaaagtcaagtctcagacgcccaaagtagaaaaaaccgagaaacccaaaaagcctaaagggagagcttacaagcgccttctatatacccgacgctttgtcaatgtcaccttggtaaacggtaaaaggcgtatgaaccccggcccctctgttcagtga

SEQ ID NO: 5312 - DNA, 1335 bp, Artificial Sequence
  Optimized genes for Saccharomyces cerevisiae
atgcctagccacttcgacacggtacaactacatgcgggccaagagaatcccggggataatgcacaccgatcccgtgcggtaccaatttatgcgacaacaagttatgttttcgaaaactcgaaacatggctcacagttgtttggcctagaggttccaggctacgtctattcgcggttccaaaacccgacgagcaatgtcctggaagagcggattgcggcccttgagggcggggcggcggcgctagccgtgtcttctggtcaggcggctcagacgcttgccattcaaggtctagctcacactggagacaacatcgttagtactagttatttgtatggcgggacgtataaccagttcaagataagtttcaaacgctttggcatcgaagctcgattcgttgagggagataacccggaagaattcgagaaagttttcgacgaacggactaaagcagtatatctagagacgattggcaaccccaagtacaatgtgccggacttcgaaaaaatcgtggcgatcgctcataaacacggtatacccgtggtggtagataacacgttcggtgccggtggttacttctgtcagccgattaagtacggagcggatatcgtcacacactcagccactaagtggatcggtggtcatggtaccactatcgggggtataatcgtggacagcgggaaatttccatggaaggattacccggaaaaattcccacagtttagccagccggcagaaggttaccatgggacaatatataacgaagcatacggtaatctagcatacatcgtgcacgtccgcacagagctgttacgtgacctcggcccacttatgaatccgttcgcgtctttcctcctactgcaaggcgtcgaaaccttaagcctgcgagccgaacggcacggcgagaatgctcttaaactcgcgaagtggcttgagcaaagcccgtatgtgtcttgggtaagttatcctggtctcgcttctcattcccaccatgagaatgccaaaaagtatttgtcaaacggcttcgggggagtgcttagttttggtgtaaaggatctgccaaacgccgacaaggagaccgacccttttaaactatcgggcgctcaagtagtcgataacctcaagttggctagcaacttagcaaatgtaggcgacgcgaaaacactagttatagctccatattttaccacgcacaaacaactcaatgacaaagaaaagcttgccagtggtgttacaaaagacttaatcagagtttccgttgggatagaattcatcgacgatataatagcggactttcagcaatctttcgaaaccgtgttcgccggacagaaaccatga

SEQ ID NO: 5313 - DNA, 2337 bp, Artificial Sequence
  Optimized genes for Saccharomyces cerevisiae
atgctgtctgcccggtccgccattaagaggccaatagtacgcgggctggcgaccgtgtctaatttaactagagattcgaaggttaatcaaaatcttctagaagaccactcttttattaattataagcaaaatgtagagacccttgacatagttagaaagcggttaaaccgcccattcacctatgcggagaagatactatacggtcacctcgatgatccgcatggacaggatattcagaggggggtgagctacctaaagctgagaccggatcgcgtagcgtgccaggacgctactgcacagatggcgatattgcagttcatgagcgctggattgccgcaggtggcaaaacctgtgaccgttcattgtgaccatttaatccaggcgcaagtcggtggagagaaggacctcaaacgtgcgatcgaccttaataaagaagtctacgatttcctagctagcgcaacggccaagtataacatgggattctggaagccggggtccggaataattcatcaaatagtgttagagaactatgcattcccgggtgctttaattatcggaacggatagccatactcctaatgccggaggcctaggacaactagctataggtgtgggcggcgctgatgctgttgacgttatggccggtcgtccctgggaactgaaagctcctaaaatactaggagtgaaacttacaggaaagatgaacggctggactagtcctaaggatattatacttaagctagccggtattacgaccgtaaaaggtgggaccggaaaaattgtagaatatttcggtgatggcgttgatacgtttagtgccactggaatggggaccatttgtaacatgggggctgaaataggggctacaacatctgtattcccattcaataaaagcatgatagagtacttggaggccactggccgcggcaagattgcggattttgcgaaattgtaccataaggacttgctgtctgccgacaaggatgcggaatatgacgaggttgttgagattgatctcaatactttagagccatacattaatgggccttttacccccgatctggccactcccgtctcgaagatgaaggaagttgccgtcgccaataattggccgttagacgtacgagtgggcctgatcggctcgtgtacgaattcgtcatatgaagacatgtcgcgctcagcctcaatcgtaaaggatgccgcagcccatggcttaaagtcaaaaacaatattcacagtgaccccgggcagtgagcaaatacgagctactatagaacgagacgggcaattggaaacatttaaggaattcggtggcattgtgctggccaatgcgtgtggtccatgtattggccaatgggatcgtcgggacatcaagaagggtgacaagaataccatcgtatcatcttataaccggaacttcacctcccgaaatgacggcaatccccaaacgcacgcgttcgtagcgtcgccagaactggtgacagcattcgccatcgcgggggaccttcgcttcaaccctcttacagacaagttaaaggataaggatggcaacgagttcatgctgaagccgcctcatggtgatggtttgccccaaaggggttatgacgctggcgagaatacgtaccaggccccgcccgctgatcgatcaacggtcgaggtcaaagttagtccaacgagtgataggctgcaacttctgaaaccctttaaaccatgggatgggaaggatgcaaaggatatgcccattctcataaaagcagtgggcaaaacaacgacggatcacatctctatggcgggtccctggcttaagtaccgggggcatcttgagaacatatcgaacaactatatgattggggctatcaatgctgagaataagaaggctaactgcgttaaaaatgtatacaccggggagtacaaaggcgtacccgacacagcaagggactatcgcgatcaaggtataaagtgggtcgtgattggggatgaaaacttcggcgaaggctctagtcgggaacacgcagcgttggagcctcgttttttaggcgggttcgcgattattacgaaatcattcgccagaatacacgaaacgaacctcaagaaacaggggctacttccattgaactttaagaaccccgctgattacgacaagataaacccagacgaccggatcgatatactcggtctggcggaactggcgcccggaaagcccgttacaatgcgtgtccaccccaaaaacggtaaaccttgggacgcggtattgacacacacatttaacgatgaacagatcgaatggttcaaatatggaagcgcactgaataagattaaggcagatgaaaaaaaatag

SEQ ID NO: 5314 - DNA, 237 bp, Artificial Sequence
  Optimized genes for Saccharomyces cerevisiae
atggccagagaaatcacggatattaaacaatttctcgaattgacaagacgtgcagacgtcaaaactgccaccgtcaaaataaacaaaaagctgaataaggccgggaagccgttccgtcagaccaagtttaaagtgcgtgggtccagcagtttgtatactttggtgattaatgatgctggcaaagcgaaaaagttgatccagtctctaccaccaacactgaaggtaaaccgattatga

SEQ ID NO: 5315 - DNA, 939 bp, Artificial Sequence
  Optimized genes for Saccharomyces cerevisiae
atgggggggattcgggagaagaaagctgaatacttcgctaagctacgcgagtacttggaagaatacaaatccttatttgtagtcggagttgataacgtgtcctcccagcagatgcacgaagtcagaaaagagctacgaggtagggccgtcgtcttaatggggaaaaatactatggtacgcagggccataaggggatttctcagcgatttaccagactttgaaaagctactaccttttgttaagggaaacgtaggttttgtatttacaaacgaaccccttaccgaaattaaaaatgtcattgtaagcaatagggtggcggcacccgcgcgagctggggcagtggctcctgaagatatctgggtcagagctgtgaataccggaatggaaccagggaaaaccagcttcttccaggccctaggggttcccactaaaatagcccgtgggaccatagaaattgtttcggatgtcaaagtggttgatgccgggaataaggtagggcaatcggaagcgtctctactcaatcttttaaacatcagtccatttaccttcggcttaacagtggtacaagtgtacgacaatggtcaagttttcccgtcatctattttagacataacggatgaagaattggtaagtcattttgttagtgcagtctccaccattgcttcaatatcgttggcaataggctatccaactcttccttcggttggtcacacgttgatcaataactataaagacctcctagctgttgccatcgctgctagctaccactacccggaaatcgaagatcttgtcgaccgaattgaaaaccccgagaagtatgccgctgctgcaccggccgctacaagtgcggcctctggagacgcagctccagcagaggaagccgccgccgaagaggaagaggagtccgacgacgatatgggattcgggcttttcgattga

SEQ ID NO: 5316 - DNA, 5631 bp, Artificial Sequence
  Optimized genes for Saccharomyces cerevisiae
atgaatacagatcagcaaccttatcaaggccaaacggattacacgcaaggtccgggaaacggccagagtcaggaacaggattacgaccaatatgggcagccgttgtaccccagtcaagccgatggctactatgacccaaatgtcgccgcgggcactgaagcagatatgtacggccagcaacctcctaacgagtcgtatgatcaggattatactaatggagagtattacggtcaaccgcccaacatggcggcgcaagacggtgaaaacttttcagacttttcgtcgtacggcccacccgggacacctggatatgacagttatggaggtcagtacacggcgagtcagatgtcgtatggcgagcctaacagctccggtacgagtacacctatttacggtaattacgaccctaacgctatagctatggcgctcccaaacgagccgtaccctgcctggacagcggacagtcagtcacccgtgagtattgaacaaattgaagacatttttattgacttaacgaaccgcttgggctttcaaagagacagtatgaggaacatgttcgaccactttatggtgctgctggacagcaggtccagcagaatgagcccagatcaggcacttttatcactacatgccgactatattgggggagacaccgcaaactataaaaaatggtacttcgctgcacagttagacatggacgatgagataggtttccgcaacatgtctcttgggaagctaagccgaaaagctagaaaggccaaaaagaaaaataaaaaagcgatggaagaggcgaatccggaggatacggaagagactcttaacaagatcgagggagacaatagtcttgaggcagctgactttcgttggaaagcaaagatgaaccaattgagtcctctagagcgggtcagacatattgctctatatctattatgttggggtgaagcaaatcaagtccgattcactgcggagtgcctatgctttatctataaatgcgcgctggactatctcgactcaccgttgtgtcaacagcgtcaggagcctatgccagaaggcgacttccttaatcgagtgattactccgatatatcactttatacgaaatcaagtgtatgaaattgtcgatgggagatttgttaaaagggagcgagatcataacaagatagttggatacgacgacttgaaccaacttttctggtaccccgaaggaatagccaaaatagtacttgaggacggtactaagctgatagagctgcccttagaggagcgctatctgaggctcggagacgtagtttgggatgacgtctttttcaagacttacaaggaaactaggacctggttacatctagttaccaacttcaaccgtatatgggtgatgcacattagcatattttggatgtattttgcttacaacagccctaccttttacacccacaactaccagcagcttgtggacaatcaacccctcgcagcttataaatgggcctcgtgcgccttaggcggtaccgtggcatcattgatccaaatcgtagccactctttgtgaatggtctttcgttccgcgcaagtgggccggggctcaacacctctcgaggaggttctggttcctatgcatcatattcggcataaacttaggtcctatcatctttgtcttcgcatacgataaggatacggtttactcaaccgcagctcacgtggtggctgctgttatgtttttcgtagcagttgccaccataatatttttttcgataatgccccttggtggattatttacaagttacatgaaaaagtccacacgcaggtacgtagccagtcagacttttaccgccgcctttgcgcccctccacggactagaccggtggatgagttacttagtctgggtgactgtctttgctgccaagtacagcgagtcgtattacttcttggtccttagtcttcgtgacccaattcgaatattgagtaccacagcgatgaggtgtactggagagtactggtggggcgcggtgctctgtaaggtgcaaccgaaaattgttctgggtctggtgattgccacagatttcatcttattttttctagatacgtatctttggtatataatagtgaatacaatattttcagtgggtaaatcgttctacctaggtataagtattcttactccctggaggaacatcttcacgagactgcctaagcggatctattctaagatactcgctaccacggatatggaaatcaagtataagcccaaggtactaatttcacaggtatggaacgccatcataatctccatgtatcgtgaacacttgcttgccatagatcatgtgcaaaagcttctctatcatcaagtaccgtccgaaattgaaggcaaacgtacgttgagagctcctacattttttgtaagtcaagacgataacaactttgaaactgagttcttcccgcgggactcggaggcggagcgaaggatcagcttttttgcccaaagtctcagtacacccatccccgagccattgccagtagacaatatgcccaccttcacggtattaaccccgcactatgcggagagaatactcctatccctgcgagaaataatacgcgaagatgatcaattcagtcgcgtgacgctccttgaatatctaaagcaacttcatcctgttgagtgggagtgctttgtcaaagacacaaagatcctcgccgaggaaacggccgcgtacgaaggtaacgaaaatgaagcggagaaggaagacgcgcttaagtctcagatagacgatctgcctttttattgtataggatttaaatcagccgcgcctgaatatacgctgcgtactcgtatatgggccagcttaaggagtcagacgctttaccgtactatctctgggttcatgaactatagtagggcgataaagctactttaccgtgttgaaaaccccgaaattgtacagatgtttggaggaaatgctgagggtttggaacgagagctagaaaaaatggcgaggcgcaaatttaaatttctggtttcaatgcagagactggctaaattcaaaccccacgaactagaaaatgcagaatttttgttacgcgcttaccccgatctacagatagcatacctggatgaagaacccccgttgaccgagggtgaggagcccaggatctactcggcccttatagacggtcactgtgagatccttgacaatggccgacggcgtcccaaatttcgggtccaactgagtggtaaccctattcttggagatggcaaaagcgataatcaaaaccacgctttgatattttaccgaggagaatatattcaactcatcgatgctaatcaggacaattatctcgaagaatgtttaaaaatcaggagcgttttagctgaattcgaggaattaaacgtggagcaggtcaacccgtatgctcctggactccggtatgaggagcaaaccaccaaccacccagttgcaatcgtgggagccagagaatacatattttccgaaaactcaggtgtcttaggggatgttgccgccggtaaggagcagacttttggcaccttgttcgctcgaaccctcagccaaattggtggcaagctacattatgggcatcctgacttcattaatgccacattcatgacgactagggggggggtgtctaaagcgcaaaaagggcttcacctcaacgaggatatatacgctgggatgaatgcgatgctacggggagggcgcatcaaacattgtgagtactaccaatgtgggaagggacgggaccttggattcggtaccatattaaactttactacaaagatcggagctgggatgggagaacaaatgctttctcgtgagtactactatttgggaacacaacttcccgtagaccgattcctaacgttctactatgctcaccctgggtttcatctaaataacttgtttattcaactatcactgcagatgttcatgctgacgctagttaacctatccagtcttgcacatgagtcaataatgtgcatatatgatcgaaataagccgaagaccgatgtattagtgcctattggctgctataactttcagccggccgttgattgggtcaggcgttacactctttctatcttcatcgtcttttggattgcatttgtgcccattgtggttcaagaattaatcgaacgtgggttgtggaaggcaacacagcgctttttctgtcacctgttgtctctgtctccaatgtttgaggtcttcgccgggcagatctacagtagtgcgctactttcggacctcgccatcgggggagcaagatacatctccaccgggcgggggtttgctacgtcaaggatccctttttcaattctgtactctcgctttgccggaagtgcaatctacatgggcgctcgctcgatgctcatgctccttttcggaaccgttgctcactggcaggctcccttgctttggttctgggcatctcttagcagtttgatattcgcaccctttgtgttcaatccccaccagtttgcctgggaagacttctttcttgactaccgcgactatataaggtggctttcaagaggaaataatcaataccatcgaaactcgtggataggctatgttcgaatgtcgcgtgctcggattactggattcaagcgaaaactggtgggtgatgaaagcgaaaaagcggctggagacgcttcaagggcacacagaacaaacctaatcatggcggagattattccatgcgctatatatgccgcagggtgctttattgcatttaccttcataaacgctcaaactggtgtaaaaacaactgacgatgaccgtgttaacagtgtcctgcgtataatcatatgcacgctcgcccctattgctgtaaatttgggagtgctgtttttctgcatgggaatgagctgctgcagcgggccactgttcgggatgtgctgcaagaagactggatctgtcatggctggcatcgctcatggtgtggccgtgatcgttcacatagccttcttcattgtaatgtgggttctcgaatcttttaacttcgttagaatgctaatcggagttgtgacttgtatccaatgccagagacttattttccattgcatgaccgcgctcatgcttactagagagtttaagaatgatcatgctaatactgcattctggacgggcaaatggtatggtaaaggcatgggctacatggcttggacccagccctcaagggagctgactgcaaaggtcatagaattatccgagtttgctgcagacttcgtattaggacatgtcattcttatttgtcaactccccttgattattattcccaagattgacaagtttcattccataatgctgttttggctgaagccttcgcggcaaatccgaccgccaatttactctctaaaacaaacgcgactacgaaagaggatggttaaaaagtattgtagcttatacttcctggtattggctatatttgcaggttgtattatcggtccggctgttgcgtctgcaaagatacacaagcatattggagactcattagatggggttgtacacaatttgttccagcctatcaatacaaccaacaatgatacgggttcacaaatgtccacttaccaatcccactattatacgcatactccctctttaaagacctggagtacgataaagtag

SEQ ID NO: 5317 - DNA, 384 bp, Artificial Sequence
  Optimized genes for Saccharomyces cerevisiae
atggcgaaacaatcgctagatgtttcgagtgaccggcgcaaggccaggaaagcctactttacagcaccgtcatcacaacgtcgcgtgcttttaagtgctcccttaagtaaggagttaagggcccaatacggaattaaagcccttccgatacggcgagatgatgaggttcttgttgtacgaggcagtaaaaaaggacaggaagggaagatatcctcggtctacaggttaaagtttgcggttcaagttgacaaagtgaccaaggaaaaggtgaacggtgcctctgtccctattaatctccatccgtccaagctggtgattacaaaactccacctggacaaagatcgcaaggcgctaatccagcggaaaggggggaaactggagtag

SEQ ID NO: 5318 - DNA, 1188 bp, Artificial Sequence
  Optimized genes for Saccharomyces cerevisiae
atgttgcgcacacaagcggcaagactgatctgcaacagtcgagtgattaccgcgaagcgaacgttcgctttagcgactcgcgcggcagcctattcgcggcccgcggcgcggttcgttaagcctatgatcacgacccggggtctaaagcagattaattttggtggcacagtggagactgtgtacgagcgggcggactggccccgcgaaaaacttctagattactttaaaaatgacactttcgccttgatcggttatggttcacaaggctacggtcagggcctgaacctaagggataacggattaaatgtcattataggtgtgcgaaaagatggagcctcctggaaggcagctatcgaagacggatgggtcccggggaagaatctattcacggtggaagatgcaattaagagagggagttacgtcatgaacctccttagcgatgccgcgcagagtgagacttggcccgcgattaaaccacttttaacgaagggcaagaccctttatttcagccatggcttcagtccggtgttcaaagaccttacccatgtcgaaccacctaaagatctcgatgtgatattagtggcccccaaaggttctggccgtacagtccgaagtctattcaaggaaggtcgtggcatcaattcaagctatgctgtctggaatgatgttacggggaaggctcacgaaaaagcccaagcactagcagtagcgatcggatctggttacgtataccagactacattcgagcgggaagttaattctgatctatacggagagaggggttgcctaatggggggaatccatggtatgtttctggcgcagtacgatgtgcttcgtgagaacggccacagcccatcagaagcgttcaatgagacagtcgaggaagctacccagtccttataccccctcatcggcaaatatggaatggattatatgtatgatgcttgctctactactgcacggcgaggagctcttgactggtacccaatttttaaaaacgccctaaaaccagtctttcaggatctatacgagtctacgaaaaatgggacggaaaccaagcgcagtttggagtttaacagtcaacctgattatcgtgaaaaactggagaaggagctagacacaattcggaatatggaaatttggaaagttggtaaagaagtgcgcaaattacgccctgaaaatcagtag

SEQ ID NO: 5319 - DNA, 171 bp, Artificial Sequence
  Optimized genes for Saccharomyces cerevisiae
atggcacacgagaatgtgtggtttagccatccgagacgctacgggaaaggttctagacagtgccgagtatgttcctcgcacactggcttgatacgtaaatacggattaaacatatgtcgccaatgcttccgagaaaaggccaatgatataggtttcaacaaatttcgataa

SEQ ID NO: 5320 - DNA, 237 bp, Artificial Sequence
  Optimized genes for Saccharomyces cerevisiae
atgttatgtcaacagatgatacgtactacggcgaagcgctcctcaaatatcatgactcgaccgattattatgaagcgttccgtacacttcaaagacggagtatatgagaacattccattcaaggttaaaggtcgaaaaactccctacgcactctctcactttggcttttttgctatcgggtttgctgtcccattcgtggcctgctatgtacagctgaaaaagtccggtgcgttttga

SEQ ID NO: 5321 - DNA, 342 bp, Artificial Sequence
  Optimized genes for Saccharomyces cerevisiae
atggctggacttaaggatgttgtaacacgagagtacaccataaatctgcataagaggctgcacggggtttctttcaaaaagagagctccgcgtgcggtgaaagaaatcaagaaatttgccaaactacatatgggaaccgaagatgtgcggctcgctcctgaattaaatcaggcgatatggaaacgaggggtcaagggggttgagtataggcttaggctccgtatcagcagaaaacgaaacgaggaagaggacgcgaaaaatccgctattttcctacgttgagccggtgttagtagccagcgctaagggactgcaaacggttgtcgttgaggaagatgcctag

SEQ ID NO: 5322 - DNA, 768 bp, Artificial Sequence
  Optimized genes for Saccharomyces cerevisiae
atggctgtaggtaaaaataaacggctttcgaaaggtaaaaaagggcagaaaaagcgtgtggtggatccctttactagaaaggaatggttcgacattaaggcgccgtccacgttcgaaaatcggaacgtaggtaaaaccctcgtaaataaaagtactggattaaaaagcgcgtcagacgccctcaagggtcgagttgtcgaggtgtgtctggcagatttacaaggttctgaagaccacagctttcgaaaaattaagctacgagttgacgaagtccaaggcaagaaccttctgacgaattttcacggcatggatttcactacggacaagctcaggagcatggtccgtaagtggcaaactctcatagaggcgaacgtcacggttaagacttcggacgattacgtgttgcgtattttcgcgatagcatttacccgaaaacaggctaaccaagttaaacggcactcatacgcgcaaagctcgcacatacgcgctatccgaaaggtcatatccgagatcctcacaaaggaggtccaaggttcaacactagcccaactaacatcaaaacttattccggaggttatcaataaagagatcgagaatgcaacgaaagatatcttcccactgcaaaatatccacgtccggaaggtcaaattgcttaaacagcccaagttcgatgtgggagctctgatggcactacatggagaaggttcaggggaagaaaaagggaagaaggtcacagggttcaaggacgaagttcttgagactgtgtag

SEQ ID NO: 5323 - DNA, 531 bp, Artificial Sequence
  Optimized genes for Saccharomyces cerevisiae
atgacagcacagcaggcgccaaaatggtatccgtccgaggatgtcgcggcgcccaaaaaaaccaggaaagctgtgcggcctcagaaactacgtgcctcactagtgcccggaaccgttctaattcttctggcaggtcgtttcagaggaaaacgcgttgtctatttgaagcatcttgaggacaacacgcttctcgtgacggggccctttaaggtaaatggagtccctttacgccgggtcaacgcccgatacgtaattgccacaagcaccaaagtttcagttgaaggagttaatgttgaaaagttcaacgtagaatattttgccaaggagaaactaactaagaaggaaaagaaagaagcgaacttattcccggaacaacagacgaaggagatcaaaaccgaaagagttgaggatcaaaaagtagtagataaagcactccttgccgagattaaaaaaaccccacttctaaaacaatatctttccgctagcttctcccttaagaacggggacaaacctcatctcttaaagttttaa

SEQ ID NO: 5324 - DNA, 1152 bp, Artificial Sequence
  Optimized genes for Saccharomyces cerevisiae
atgtcggagactgaacttcgtaaacgacaggcacaatttacacgcgagttgcatggggatgacatagggaaaaagaccggactgagcgccctcatgtcgaagaataactcagcccaaaaggaggctgttcaaaagtatttgagaaactgggacggtcgtactgacaaggatgcggaggaacgacgccttgaggactataacgaggcgacgcactcgtactataatgttgtgaccgatttctatgaatacggatgggggtcctccttccacttctctaggttttacaagggggaaagtttcgcggcgtcgatcgctcggcacgaacattaccttgcgtacaaagcagggattcaacggggggacctggtgctcgacgtcgggtgcggtgtgggtggcccagcaagggagatagctagatttacgggctgtaacgtaattggcctgaacaataacgattatcagattgcaaaggccaaatactatgcgaaaaaatacaacttgtccgatcaaatggactttgtcaaaggtgattttatgaagatggattttgaggagaacacctttgataaggtgtatgccatcgaggctacgtgccacgcacccaaattggaaggggtatacagtgaaatctacaaggtgttaaagcccggcggaactttcgctgtgtatgagtgggtcatgacagacaagtatgatgagaataatccggagcaccgaaaaatcgcctatgaaattgaactgggagacggtattccgaagatgtttcatgtcgacgtggctaggaaggctctaaagaactgcggctttgaagtactcgtctcagaagatcttgctgacaatgatgacgagataccgtggtactatccattgaccggtgagtggaaatacgtgcagaacttagcaaacttagcaaccttttttcgtacttcatatctaggccggcagtttacgacggctatggttaccgtgatggaaaaactcgggttagccccggaagggtcaaaggaggtgaccgccgctctcgagaacgcggcagttgggttagtagctggcgggaaatccaaactcttcactccaatgatgttgtttgtcgcccgtaagcccgaaaatgcggaaacaccttcccagacaagccaggaagctactcagtag

SEQ ID NO: 5325 - DNA, 636 bp, Artificial Sequence
  Optimized genes for Saccharomyces cerevisiae
atgcaagtactacaactttggctaactacgctaatttcgcttgtcgtggcagtgcagggtctacactttgacatcgcggcaagtaccgacccggagcaagtgtgtattcgcgatttcgtcacagagggtcagcttgttgtggctgacatccactcagatggttcggtcggtgatggacaaaagctgaacctgttcgtacgggatagtgtaggaaatgagtatagacgaaagcgtgactttgcaggagatgtccgggtagcgtttacagctccttcgagtacagcattcgatgtctgttttgagaatcaagcgcaatatcggggcaggtccctgtctcgagcgatagaattggatatagagtctggtgcagaggcgcgcgattggaataagatttccgccaacgagaaacttaaacctattgaggtggagctacgtcgcgtcgaggaaataactgacgagatcgttgacgagttgacttatctaaaaaacagggaagagcgcctgcgcgacactaatgaatcaacgaatagacgcgtcaggaattttagcatcttggttattattgtactgtcttctctgggggtctggcaagtcaactatctcaagaattattttaagaccaaacacatcatctaa

SEQ ID NO: 5326 - DNA, 411 bp, Artificial Sequence
  Optimized genes for Saccharomyces cerevisiae
atgggtcgcgtccgaacaaaaaccgtaaaaagggcgtccaaggcattaatcgagcgctactacccgaagttaacgcttgacttccagaccaataagagactctgtgacgaaatcgcgaccatacaatctaaaaggttacgaaataaaatcgccgggtatacgacgcatttaatgaagcgcattcaaaaggggccagttagggggatttctttcaagcttcaggaagaggagcgggaaaggaaggaccaatacgtgccggaagtatcggctctggacctgagcaggtctaacggtgtgttaaatgttgacaatcagacgtccgatttagtgaagtctcttgggctcaaattaccgctatctgtgataaatgtatcggcccaacgcgaccgacgttaccggaagcgggtatag

SEQ ID NO: 5327 - DNA, 441 bp, Artificial Sequence
  Optimized genes for Saccharomyces cerevisiae
atgagtttggtcgtccaagaacagggtagtttccaacatatacttcggcttcttaacacaaacgtcgacgggaatattaaaatagtgtatgcgctcactaccatcaagggggtaggtcgccgctacagtaatcttgtttgtaaaaaggcggacgtggatttgcacaaaagggctggggagctcactcaagaagaactcgaacggattgtgcaaatcatgcagaacccaactcactataaaattccggcctggtttctaaaccgacaaaatgatattactgacggaaaagactaccacacgttggcgaataacgtagagagtaaattaagagatgacttagaaaggttaaaaaaaattcgggcgcacagaggtatacgtcatttttggggacttcgcgtgcgcgggcagcacacgaagacaaccgggcggagaagagcctga

SEQ ID NO: 5328 - DNA, 591 bp, Artificial Sequence
  Optimized genes for Saccharomyces cerevisiae
atggtagcacaagtccagaagcaagctcccacttttaagaaaaccgctgttgtcgacggtgtattcgatgaggttagtctcgacaagtataaaggcaagtacgtcgtccttgccttcattccgcttgcctttacgtttgtttgtcccacagagattatcgccttctcggaagctgctaaaaagtttgaagaacagggagcccaagtcctatttgcctctacggatagtgagtacagcttgctcgcatggactaacataccgcgaaaagaagggggattagggccgataaacatacctttgctcgctgacactaatcacagccttagcagggattacggtgtactgatagaagaggaaggtgttgctcttagagggttattcattatagaccccaagggtgtcatccggcatataacaattaacgacctccccgtggggaggaacgtagatgaagcactgagactggtcgaggcatttcagtggaccgacaagaacgggaccgtgctaccttgtaattggaccccgggggccgctaccatcaagccgacagtagaagatagcaaagagtattttgaggcggctaacaagtag

SEQ ID NO: 5329 - DNA, 768 bp, Artificial Sequence
  Optimized genes for Saccharomyces cerevisiae
atggctgttggtaaaaacaagaggctctcccgcggtaaaaagggcctcaaaaagaaggtagtcgatcctttcacgcgcaaagagtggtttgatataaaagctccgagcacctttgagaaccgtaatgttggcaagacactcgtcaacaaatcgactggtttaaaaaacgcatcggatgccctgaaggggcgggtggtcgaggtgtgcttggcagatctacaagggagtgaggaccactctttcaggaaggtcaagttaagggtggacgaggttcagggcaaaaatttactgactaatttccacgggatggacttcacgacagataagcttagaagtatggtccggaaatggcaaacactgattgaggcgaacgttacggtcaaaacatcagatgattacgttctgcggattttcgcaatagcgtttacgcgcaaacaagccaaccaagttaagaggcactcatacgcccaaagcagtcacataagggccattcgtaaagtaataagcgagatacttacccgggaagtgcaaaattcaacattggctcagttgacgtccaaactgattcccgaagtaatcaataaagaaatagaaaatgctactaaagatatattccccctccagaatatccacgtacgtaaagtcaagctattaaagcagccaaaattcgatgtgggtgctcttatggcgctgcacggagaggggtcaggtgaagaaaagggcaaaaaggtgtctggcttcaaggacgaggttttagaaacggtctaa

SEQ ID NO: 5330 - DNA, 531 bp, Artificial Sequence
  Optimized genes for Saccharomyces cerevisiae
atgtctgcgcaaaaagcgcctaagtggtacccatccgaagatgtcgccgcactaaaaaaaacgcgcaaggcggcgcgccctcaaaagctgcgtgcttccctagtccctgggactgtccttatccttctcgcgggtcgttttagggggaaacgggtcgtttatctaaaacatctggaagacaacactttactgatctccggacccttcaaggttaatggtgttcccctcaggagagtgaatgctcgttatgttatagcgacatctacgaaggttagtgtggaaggtgtaaatgttgagaaatttaacgtcgagtattttgctaaggagaaattaaccaagaaggaaaaaaaagaagccaatttgttccctgagcaacagaataaggagattaaagctgagcgagttgaggaccagaaggtcgtcgacaaggcacttatagctgaaataaaaaaaaccccattgttaaagcagtatttatctgccagcttttcacttaagaacggcgacaaacctcacatgttgaaattctag

SEQ ID NO: 5331 - DNA, 180 bp, Artificial Sequence
  Optimized genes for Saccharomyces cerevisiae
atgctcaagcgttttccaaccccaattctgaaggtttattggcctttcttcgttgcgggagcggcagtctattatgggatgagcaaggccgctgacttgtcgtctaatactaaggagttcatcaacgacccgcgtaatccccgtttcgcaaagggcggtaaattcgtggaagttgattag

SEQ ID NO: 5332 - DNA, 960 bp, Artificial Sequence
  Optimized genes for Saccharomyces cerevisiae
atggcttcgaacgaagttctcgtcctaaggggcaccctcgaggggcacaatggttgggtaacaagtctggccacctctgcagggcagcccaacttgctgctctcagcgtcgcgagacaaaactcttatttcgtggaaattaaccggagatgaccagaagtttggggtgccagtgaggtctttcaaaggtcactcacacatcgttcaggattgcaccttaaccgcagatggcgcatatgctctctctgcatcctgggacaaaaccttgagactctgggatgttgctaccggtgaaacctaccagcgcttcgtcgggcataaatcagacgttatgagtgttgatattgacaagaaggcttctatgataatctccggctcgcgagataagactatcaaagtctggacgatcaagggtcaatgtctggcaacactactcggccacaatgactgggtttcccaagtgagagttgtacccaatgagaaggccgatgacgattctgtgacgattataagtgctggaaacgacaaaatggtgaaagcttggaaccttaatcagtttcagatcgaagctgatttcattggacacaattcgaacataaataccttgaccgcctcgccggatggtaccttgatagccagtgcgggcaaagatggtgagataatgttatggaatctagctgccaaaaaggccatgtataccctatctgcccaagatgaagtgttttctttagcgttcagccctaatcgatattggcttgcggctgcgaccgccaccggaatcaaggtgttttcgttagacccccagtacttagtagatgatctgcgtcccgagttcgcaggttattcgaaagccgctgaaccgcatgccgtttcgttggcgtggagcgcagatggacagactctcttcgcaggttatactgacaatgtgatacgggtatggcaagtcatgacagccaattaa

SEQ ID NO: 5333 - DNA, 255 bp, Artificial Sequence
  Optimized genes for Saccharomyces cerevisiae
atggcttcttcaacttcgactagcgccagtgcaagctcatcgatcaagacgaattccgctcttgtaagtaacaatgtagtcgcggcctcttcagtgagcgcgaccagcacagcgtcgagctcagccgctaagaacacgaccagttcgagcaagaatgcagcccccggtatggttgccaatccggtttcgtctaagtatgggattattatggccgcctttgctgcagtatcctttgtgctgggaacaggcatatga

SEQ ID NO: 5334 - DNA, 600 bp, Artificial Sequence
  Optimized genes for Saccharomyces cerevisiae
atggcaatatcaaaaaatcttccgatcctcaagaatcattttcgcaaacattggcaagagcgggtaaaggtacatttcgaccaagcgggaaaaaaagtcagcaggcgcaacgctcgagcagcacgtgctgccaaaatcgcacctagacccctcgatctattgcgtcccgtggttcgcgcaccgactgtaaaatacaatcgaaaagtcagggcgggtagagggttcaccctggctgaggtcaaagcagcgggtttgaccgcggcatacgctaggacgattggaattgcagtcgaccatcggcggcagaatcgtaatcaggaaatctttgatgctaatgtccaaaggcttaaagagtaccagtcgaagattatcgtcttccctagagacggtaaggcgccagaagccgagcaggtactgagtgcagctgcaacatttcccattgcgcaaccggcgaccgacgtagaggcgagagccgttcaggataatggtgaaagcgcatttcgcacactacgacttgcgcgttccgaaaagaagtttagaggaattcgagaaaagcgagcaagggaaaaagcggaggccgaggccgaaaaaaagaaataa

SEQ ID NO: 5335 - DNA, 2118 bp, Artificial Sequence
  Optimized genes for Saccharomyces cerevisiae
atggctggtgagactttcgagtttcaggctgagattacgcaattgatgtccctaatcatcaacacagtctattcgaacaaggaaatctttcttcgcgagttgatttcaaacgcatctgatgctctcgataagatcaggtatcaggcgttgtctgaccccaagcagttagaaactgaaccggacctgtttattcgcatcacgccaaaacctgaggagaaggttctcgaaataagagattctggaataggaatgacgaaagctgagttaataaataatctagggacgatcgcaaagtcaggaacgaaagctttcatggaggctttgtcggcaggcgccgacgtttccatgattgggcagttcggtgtaggattctatagtctgtttttggtcgctgacagagtgcaggtaatatccaaaaataacgaggatgaacaatacatctgggagtccaatgcgggcggctcattcaccgtcactctagacgaagtcaacgagagaataggacgggggacagtattgcggctttttctaaaagacgatcagttggaataccttgaggaaaagcgcataaaggaggtaatcaagcgccatagcgagttcgtagcttaccccatacagctgttagtgactaaagaggtggagaaagaggtcccaattccagaggaggaaaagaaagacgaggaaaaaaaggacgaggacgacaaaaagccaaagctggaagaggtagatgaagaagaagaggaaaaaaagccgaaaacaaaaaaggtaaaagaggaagtacaggaactggaagaactgaacaaaacaaagccactctggacgcgtaacccctcagatattactcaggaggagtacaacgccttctataaaagtatcagcaatgattgggaagatccgctttatgttaagcatttctcggtggaaggacaactcgaattccgtgctatactattcataccaaagcgcgcacccttcgacctatttgagtcaaagaagaagaaaaataatattaagctttacgtaagaagagtttttatcacagacgaagccgaggacctaatccccgaatggttatcttttgtaaagggggtggtcgactcagaagacttaccactcaacttgagccgcgaaatgctacaacagaacaaaataatgaaagttatccgcaaaaacatcgttaagaagctaatcgaagccttcaacgaaattgctgaggattcggaacaatttgataagttttattcagcctttgcaaaaaatatcaagctcggagtccatgaagacactcaaaaccgagcagcccttgctaaactattacggtacaactccacaaaaagcgtggatgaactcacctcgcttactgactacgtcacccgcatgccagagcatcagaagaatatctattacattaccggtgaatccctcaaagcagttgagaagtctccattcctggacgcattaaaggctaagaatttcgaagtactatttctaactgacccaatagacgaatatgcgtttactcagctcaaagagtttgaaggaaaaacgctagtcgacattactaaagactttgagctcgaagagacagatgaggagaaagccgagcgagagaaggaaataaaggaatacgaacccctgacgaaggctcttaaagatatactgggagatcaagtagagaaagtggttgtgtcttacaaacttttagacgccccggccgcaattaggactggtcaatttggctggtccgcgaatatggaacggattatgaaagcgcaggcgctgcgggattcatctatgagtagttacatgtctagcaaaaagacttttgagattagcccaaaatcaccgattataaaggaactcaagaagcgagtagacgagggcggcgcacaggacaaaactgtaaaggacctgaccaaccttctgtttgagaccgcgctattgacatcaggcttcagtcttgaagagccaacgtcctttgctagccgcattaaccgtctcatatcattaggactcaacatagatgaagatgaggaaactgagacagcacccgaggcatcaactgaggcgcccgtcgaagaggtaccggcagataccgaaatggaggaagttgactaa

SEQ ID NO: 5336 - DNA, 303 bp, Artificial Sequence
  Optimized genes for Saccharomyces cerevisiae
atgactgtcaagacaggcatagcaatcggactgaacaaggggaagaaggtaacgtcaatgacaccggctcctaaaatctcttacaagaaaggagccgcgagcaaccgaacaaaattcgtcaggagtctggtgagagaaatcgctggactaagtccatatgagcgacgactaatcgacttgatcaggaactccggcgaaaagagagctcgtaaagtcgcaaaaaaacgcctggggtcgttcacacgtgctaaggctaaggtcgaagaaatgaacaacatcattgctgcttccaggaggcattaa

SEQ ID NO: 5337 - DNA, 669 bp, Artificial Sequence
  Optimized genes for Saccharomyces cerevisiae
atgaagttttttccactgcttctattaataggagttgttgggtacataatgaacgtactttttactacctggctacccactaattatatgttcgacccaaaaacattaaatgaaatttgtaatagtgtgatctccaagcacaacgccgcggagggtttgtcgaccgaagacctactacaggacgttcgcgatgcccttgcctcgcattatggcgatgagtatattaacaggtatgtcaaagaggaatgggtttttaacaatgctggaggtgcaatgggacagatgattatattacatgcatcggtgagcgagtatcttatactgtttggaaccgccgttggaaccgagggtcacaccggggtgcattttgctgacgactattttactattttacatggtacgcagatcgctgctctgccttatgctacggaagccgaggtttacacacccggaatgacacaccatctgaaaaagggctacgcgaagcaatacagcatgccgggggggtcattcgcgctagagctggctcaggggtggatcccctgtatgcttccctttggctttttggacacattttcctcaacgttagatttatacacactctatcgtacggtatacctcactgctcgagatatgggcaaaaacttgttacagaataagaagttttga

SEQ ID NO: 5338 - DNA, 2880 bp, Artificial Sequence
  Optimized genes for Saccharomyces cerevisiae
atgacagtaaccacgccgtttgttaacggaacctcttattgtactgtaaccgcttactcagtccagtcatacaaagccgctatagatttctacaccaaattcctaagcctcgaaaatcgttcatctccagacgaaaactctacgctactatcgaatgattccatttcgctcaagatactattgcggccagacgagaaaatcaacaaaaacgtagaggcgcacctgaaagagctaaattctatcaccaagactcaagattggagaagccacgccacacaaagcttggtattcaatacttccgacattctggcggtcaaagataccctgaacgcaatgaatgcacctctgcaaggttaccctacagagttatttccgatgcaattatatacccttgaccccctcgggaacgtagtgggggtgacttctactaagaatgcggtaagtacaaagccaaccccaccgccagcaccagaagcttcagctgagagtgggctgagctcgaaagttcactcttataccgatctggcgtatcgtatgaagactacagatacgtacccaagtttaccgaaacccctcaaccgccctcagaaggctattgctgttatgacgtcgggtggcgatgcgccggggatgaatagtaacgttcgtgcgatagttcgcagcgcaatattcaaggggtgccgcgcattcgttgtaatggaaggatacgaaggactagtgcggggcggtccagagtatattaaggagttccactgggaagacgtccgcggttggtcagccgaaggcggcaccaatattggtaccgctcggtgtatggaattcaaaaaaagagaggggcgactgctaggagcgcagcatcttatagaagcaggcgttgacgctcttattgtgtgcggaggagatggcagtctcactggagccgacttatttcgtagtgaatggccctctctgatagaggaattgctaaaaacaaatcgaatatcaaacgaacaatacgaacgcatgaagcatctcaacatctgcggaacggtgggttcgatcgacaatgatatgagcacaacagatgccacgatcggggcatactcggccctggatcgcatctgcaaagccattgactacgtagaggctacggccaactctcatagtagggcgtttgtggtggaggtaatggggcgtaactgtggctggctggcactgttagcaggaatcgccacctctgctgattacatcttcatcccggagaagcctgcgaccagcagcgaatggcaggatcaaatgtgtgacatcgttagtaaacaccgtagtcggggcaagcgaaccaccatagtggttgtcgccgaaggagcaatcgcggcggatctgacgcctatttccccaagtgacgtccacaaagttctagtggatagattaggtttagacactcgaataacgacactcggacacgtccagcgaggcggtacagctgttgcatacgaccgtatactggcgacgcttcaggggttggaagccgtaaatgcggtactcgagtcgacaccggataccccctcccctttaattgcagtaaacgagaacaagatagtccgtaagcccctgatggaatccgtcaagttaactaaggctgttgctgaggcaatccaggctaaggactttaaacgtgcgatgtcgttgcgggacaccgagttcatcgagcacctcaacaactttatggcaataaattcggcggaccataacgagcccaaacttcccaaggataagcgacttaagattgccattgtgaatgtaggcgcgccagcgggggggataaatagtgcggtctattcgatggcaacgtactgtatgtcacagggccacagaccgtacgcgatttataatggctggagtggactagcgcgacatgaaagtgtaagaagccttaattggaaagatatgttagggtggcaatcacgcgggggctctgaaattggcacgaatagggtcacgccggaggaggccgaccttggtatgatagcctactacttccagaagtatgagttcgacggactgattatagtggggggattcgaggcttttgagtcattacaccagctcgaacgggcgcgagagtcgtacccggctttccgcattccaatggtgctaattcccgcgactctcagtaacaatgtgccaggcacggagtacagcctcggttcagatactgcactaaacgcactgatggaatattgcgacgtagtgaaacaaagcgcaagcagcacccggggccgggccttcgtggtagattgtcagggaggaaattctgggtacttagcaacatacgcctccttggctgttggagcccaggtctcgtatgtgccagaagaaggaatttctctagagcaactaagcgaagacatcgagtatttagcacagagttttgagaaggccgaaggaagaggccgcttcggaaaactcattctgaaatccactaatgcgtccaaagcgctttcggcgactaaattagccgaagtaataaccgcagaagcagacgggaggttcgatgcaaaaccagcctacccagggcacgtgcaacaaggtggtctacccagccctattgaccggactcgagcgacccgaatggcaattaaggccgtgggattcataaaggataatcaggctgcgatagcggaagcacgtgccgcggaggaaaacttcaatgcggatgataagaccatatctgacactgcggctgtagtaggtgttaagggatcgcatgtagtctataattcaattcggcaattgtacgactatgaaactgaagtgtccatgcgtatgccaaaagtgattcattggcaggcaactcgtctgatcgcggatcatctcgtcggcagaaaaagggtggactag

SEQ ID NO: 5339 - DNA, 804 bp, Artificial Sequence
  Optimized genes for Saccharomyces cerevisiae
atgagccaaggcaggaaagcggctgaacgcttagccaagaaaaccgtactaatcactggcgcgtcggcggggataggcaaagctacggcgttggaatatctagaggcgtctaacggtgatatgaagctaatactagccgcacgtaggctcgaaaagttggaggagctgaagaaaaccatcgaccaagagtttcctaatgccaaggttcacgtggctcaattggacataacacaagctgagaagattaagccttttatagaaaatttaccgcaggaattcaaagacattgacatcttagtgaataacgcagggaaggctttaggctcagatcgcgtaggccaaatcgcgaccgaagacattcaagatgtcttcgataccaatgtaaccgctttaataaacatcacgcaagctgtgctccctatcttccaagccaagaatagtggagatatagtcaacctgggctctatcgcagggcgcgatgcgtatccgacgggatctatctattgtgctagtaagttcgcggtaggcgcgttcacagactcattgcgaaaagaattgataaacacgaaaattcgcgttattctaatcgcgccgggactagtcgagactgagttcagcctggttcgatatcggggtaatgaagaacaagctaaaaatgtatacaaagacaccactcccctcatggccgacgacgtcgctgacttgattgtatatgcgacgtcacgtaagcaaaatactgtaatagctgatactctaattttcccgacaaatcaggcatctcctcaccacattttcaggggttga

SEQ ID NO: 5340 - DNA, 519 bp, Artificial Sequence
  Optimized genes for Saccharomyces cerevisiae
atggctcactttaaagagtaccaagtcatcggccgccggctaccaacggagagcgtgcccgagcccaagctgtttaggatgcgaatattcgcatcgaacgaggtgatcgcgaagtccagatactggtactttctccagaaattacataaggtaaagaaggcatctggagagatagtaagcattaaccaaattaatgaggcgcacccaactaaagtgaaaaacttcggtgtgtgggttcggtatgattcacgcagtggaacgcataatatgtataaggaaatacgagacgttagccgtgtggctgctgttgagacgctatatcaagatatggccgccagacaccgcgcaagattccggtcgattcacatactgaaagtggctgaaattgagaagacagcggacgtgaagcgtcaatacgtaaaacaattcctcactaaagaccttaaatttcccctaccgcatcgtgtccaaaaatcgacaaagactttcagttataaacggccatcaacgttttactag

SEQ ID NO: 5341 - DNA, 180 bp, Artificial Sequence
  Optimized genes for Saccharomyces cerevisiae
atgaagttgagtcaagtcgtcgtatctgcagtagctttcacaggcctagtaagtgctgcaaactcctctaacagtagctcatccaaaaacgccgcacaaccaattgcagggcttaacaacgggaaagttgccggagcggccggtgtagcattggccggagctctcgctttcctgatctga

SEQ ID NO: 5342 - DNA, 183 bp, Artificial Sequence
  Optimized genes for Saccharomyces cerevisiae
atggccaacaaagttatccagctccagaagatattccagagttctactaaacccctctggtggaggcacccacggtcagctctgtacctttatccgttctatgccatcttcgctgtagccgtggtcactccattgctttatattccaaatgccattcggggaattaaagctaagaaagcctag

SEQ ID NO: 5343 - DNA, 594 bp, Artificial Sequence
  Optimized genes for Saccharomyces cerevisiae
atgatgcattttagaaaaaaaagtagcatatcgaatacctcagatcatgacggggcaaatagagcctcagacgtcaagatctcggaagatgataaggcacgattaaagatgaggacagctagtgtcgcagatccgattctagacgctgttcaagaagcccagccattcgaacaggctgcggatacattccatgacaatatgaatcgacaatcctacttcagcaacgaggaagggcatgttctgtgcgatgtgttcgggcagccgattactcaggctgatatatcaaatcccactcgggcgcgggatgaacgccccctggacacgatacggtccttcgaatatgcagtctcaggggatcccgtatgggcgcagcaacttgaaaccccaacgtacggcttccgtgtgcggcccgacttcccagtctttggagccgccgtgacatatgacgccaatggtatgcctcaacaagtgggcggcgcctcgagtcagatgtacggagagcaagccgtgtaccaaccccaacaacatgttcaaacagaagagaagcaaaagaagaagaagaaaggacttttcggtaggatgaaaaaaaagtga

SEQ ID NO: 5344 - DNA, 1680 bp, Artificial Sequence
  Optimized genes for Saccharomyces cerevisiae
atgttatttaagtctctctctaaattggccaccgccgccgcgttctttgcgggagtcgcaactgctgacgacgttccagctatcgaagtggttggaaacaaattcttttactcaaataacgggtcacaattttatattagaggtgtggcctatcaagctgataccgctaatgagacgagcggttcgactgtaaacgacccactagctaactatgagtcgtgttctcgagatataccgtacttgaagaaactcaatacaaatgtgatccgcgtttatgcaattaataccacactagaccatagcgagtgtatgaaagcactgaatgacgcggatatatacgtgatagcagatttagctgctccggcgacgtcaatcaacagggatgacccgacttggaccgtagatctgttcaatagctataaaacggtggtcgacacgtttgctaattacacgaacgtcctcggtttttttgcaggaaatgaagtcacaaacaactacaccaacacagatgcttctgcttttgtcaaggcagccattcgggacgtccgccagtatataagtgacaagaattatagaaaaatccccgtgggctattcctcgaatgatgatgaagacacgcgagttaaaatgacagactacttcgcttgcggcgacgatgatgtcaaggcggatttttacggtataaacatgtatgagtggtgcgggaagtctgacttcaagactagtggctacgcggatcgtacggccgagttcaagaacctgtcgatacctgttttcttctctgaatacggatgtaatgaagtcacccccagactatttactgaggtcgaagcgctctatgggagtaatatgacagacgtgtggtccggtggaattgtatacatgtattttgaagaaaccaacaaatatggacttgtatctattgacggcaatgacgtgaaaaccttggacgatttcaacaactattcttccgaaatcaacaagatttcgccgacgagtgccaataccaaatcttactcagcaactacctcggacgtcgcctgtccggctactggtaaatactggagcgctgcgaccgaattaccccctacgcccaacggtggtctctgttcgtgcatgaacgcggcaaactcgtgcgttgtcagtgacgacgttgattctgacgactatgagactctctttaattggatttgcaatgaggtggactgctcaggcatatcagcaaacgggactgccggtaagtacggagcctattctttttgtacgcctaaagagcagctgtcattcgtgatgaacttgtattatgagaaaagcggcggctccaagtcggattgctcattttccggcagtgccacccttcaaacagcaaccactcaagctagctgcagctcggcccttaaagagatcgggagcatgggtaccaactccgcatccgggtcggtcgatctcggatcgggaacggaatcgtctacggcttcatcgaatgctagtggatcgagcagcaaatctaactcgggctcttccggatcttcaagttcttcgtcttcttcctctgcctcttctagtagttcctctaaaaaaaacgcagctacgaatgtcaaagccaatcttgcccaagtcgttttcacttcgataatatccctatctatcgcggcgggagttgggttcgccctcgtatga

SEQ ID NO: 5345 - DNA, 411 bp, Artificial Sequence
  Optimized genes for Saccharomyces cerevisiae
atggcgagaacgaagcaaactgctcgtaaaagcacaggtggaaaggcgccgcgaaagcagttggcatcaaaagcggctcgaaaatcagcgcctagcactggcggtgtcaaaaagcctcaccgatacaaaccagggacagttgctctaagggagattagaaggtttcaaaaatcaacggaattactgataaggaagctacccttccagcgccttgtacgagagattgctcaagattttaagactgacttacgctttcagtcatcggcgataggggccttgcaggaatctgtggaagcgtatttggtatcgttatttgaggacacgaacttggctgccatacacgccaaacgcgtcaccattcagaaaaaagatatcaagctggcacgacgcttgagaggggagcgctcatag

SEQ ID NO: 5346 - DNA, 852 bp, Artificial Sequence
  Optimized genes for Saccharomyces cerevisiae
atgtcgccaccagtatattccgatatcagccgtaacatcaacgatctgctaaacaaagacttctaccatgcgacacccgcggcgttcgacgttcaaactacgactgcaaacggtatcaaattcagtctgaaggctaaacagcctgtcaaggacgggcctctctccactaacgtggaggccaaattgaatgacaaacaaactggactggggcttacacaaggttggtcaaatactaataatcttcagactaaattagagttcgctaacttgaccccagggctaaaaaatgaactcataacgtcactaacgccgggagtagccaaaagcgccgtcttaaataccacgttcacccagcccttctttacggcgcgtggggccttcgatttgtgcctgaaatcgcctacgtttgtcggcgaccttacaatggcccacgaaggcatagttggtggagcggaattcggctatgatatatccgccggtagtatcagccgatatgcgatggcactcagttatttcgccaaagattatagtctgggggcaacacttaacaacgagcaaataaccaccgtggattttttccagaatgtaaacgcgttcctccaggtaggggcaaaagcgacgatgaattgtaagctccccaactcaaacgtgaacatagagtttgcaactcgatacctaccagacgctagtagccaggtcaaagcgaaggtgagcgacagtgggatcgtcaccctggcctacaagcagttactgaggcctggagtgactctaggggtcggatcatccttcgacgccctgaagctttcagaaccggtacacaagcttggttggtcgttatcgttcgatgcctag

SEQ ID NO: 5347 - DNA, 1230 bp, Artificial Sequence
  Optimized genes for Saccharomyces cerevisiae
atggttaaagaaacgaagttttacgatattcttggagttcctgtcaccgctaccgatgttgagatcaaaaaagcgtaccggaagtgtgcgcttaagtaccatccggataagaatccttccgaagaagcagcagaaaagtttaaagaagcatctgccgcttacgaaatcttaagtgatccggaaaaacgcgatatctacgaccaatttggcgaagacgggcttagcggcgcgggtggcgctggcggtttcccgggaggaggttttggtttcggagacgatattttctcgcagttttttggcgcgggtggagcgcagcggccacgaggccctcagcgcggaaaggacataaaacacgagataagtgcctcacttgaagagctgtataaaggtaggaccgcgaaactcgctttgaataaacagattctatgcaaggagtgcgagggtagaggcggaaagaagggggcagtgaagaaatgtaccagttgtaatggccaagggataaaatttgtcacccggcagatgggtccgatgattcagaggttccaaaccgagtgtgacgtgtgtcatggaactggggatatcatcgatccaaaagatcgatgcaagtcatgcaacggtaaaaaggttgagaacgaacggaagattctcgaggtccacgttgagccaggtatgaaggatggacagcggatcgtctttaagggtgaagctgatcaagctcccgatgtcattccaggggatgtggtatttatcgtatccgagagaccgcacaagagctttaagagggatggtgacgacctcgtgtatgaagcagaaatcgatttgctgaccgcaatcgcgggtggcgaattcgctctggagcatgttagtggagactggttgaaagttggaatcgtaccaggagaggtgattgcgccgggcatgaggaaagtgattgaagggaaggggatgccaatcccgaaatatgggggttacgggaacctaataattaaatttaccattaagtttcccgagaatcacttcaccagcgaagaaaatctgaagaagctcgaggaaatattgcccccccggattgtcccggccatcccaaagaaggcaacggtggatgagtgtgtccttgcggacttcgatcccgcgaaatacaaccgcactagggccagccgcggtggcgctaactatgattcggacgaagaagagcaaggcggggaaggagtacagtgcgcttcacagtag

SEQ ID NO: 5348 - DNA, 597 bp, Artificial Sequence
  Optimized genes for Saccharomyces cerevisiae
atgagtcaacctgtggtagtgattgacgcgaaagaccatctgctggggcgattggcctctacaattgcaaaacaggtgttaaacggacagaagatagtagtagttcgagcagaagcgctgaacatctccggggagtttttcagaaacaagttgaagtatcacgattttctacgcaaggctacagcttttaacaaaactcgcggcccatttcatttccgcgctccttcgcgtattctctacaaggccatcaggggtatggtgtcgcacaagactgcccggggtaaggcagctctagaacgacttaaaattttcgaggggattccgccaccatacgacaagaagaagcgtgtcgtagtaccccaagcattacgtgtccttaggttaaagccaggtaggaaatacaccaccctaggcaaattgagtacgagcgtagggtggaaatatgaagacgtggtcgcgaaactggaagataaaagaaaagtccgatcggcagaatactatgctaaaaagcgggcattcactaagaaagttagctccgccagcgcagctgcttccgagtctgatgtggcgaaacaattagcctcctttggctactag

SEQ ID NO: 5349 - DNA, 1449 bp, Artificial Sequence
  Optimized genes for Saccharomyces cerevisiae
atgtccgcatttgtaagagtagtcccgcgtatttcaagatcgagtgtactcacccgttcccttcgattgcagctgcgttgctacgccagctacccagagcacacgataatcggcatgcccgccctaagtcctacgatgactcagggtaatttagcagcgtggacaaaaaaggagggtgaccaattgtcgccaggggaggtgatcgctgaaatagaaactgataaagcccagatggattttgaatttcaggaagatgggtacctcgcgaaaattttagttccagaagggacaaaggacattccggttaacaaaccaatagctgtctacgttgaggacaaagctgatgttccggccttcaaggacttcaagttagaggatagcggctccgattcgaaaacgagtaccaaagcgcagccggctgaaccacaagctgagaaaaagcaagaagctccagcggaggagacgaagacgtccgcgcctgaggcgaagaagagcgacgttgcagcaccccaggggaggatattcgcgagccccttagcgaaaacgatagctctcgaaaagggcataagtctcaaggacgtgcatgggactggtccacgagggcgaattacaaaagcagacatcgaaagttatttagaaaagagctcgaagcagagttcacaaacatcgggcgctgcggccgcgactcctgccgctgcaacatcgtcaacgaccgcgggaagtgcaccatctcctagctcaaccgcctcttatgaggacgtccccatctcgaccatgcggtcgatcataggggaacggctgctacaatcaactcaaggcatccccagttacatagtgtcctctaaaataagcatatcaaaactgttaaaacttcgacaatccctaaatgccactgcgaacgacaagtataaactgagtataaatgacttgctggtcaaggcaattactgttgcagcgaagcgggttccggacgcgaatgcctattggctcccaaacgaaaatgtaattcgcaagttcaaaaatgtggacgtctcagtcgccgtagcaaccccgacgggtcttctaactcctatagttaaaaactgcgaggctaaaggtctatctcaaatatctaacgaaatcaaggagctggttaagagagctcggattaataagctggcgccggaagaattccaaggaggcacaatatgtatcagcaacatgggcatgaataacgcggtcaatatgtttacaagcatcataaaccccccccaatctacaatattggctatcgcaaccgtggagcgcgtggccgttgaagatgcagctgccgagaatggtttctcttttgataatcaggtcaccataaccgggacgttcgaccacaggaccatcgacggcgccaagggtgctgagtttatgaaggaattgaagacagtgatagaaaatccgttagagatgctactatga

SEQ ID NO: 5350 - DNA, 1860 bp, Artificial Sequence
  Optimized genes for Saccharomyces cerevisiae
atggttaaagagtcgataattgcactggctgagcatgcagcctctcgtgcgtcccgtgtcattccaccagtaaaactggcgtacaaaaatatgctaaaagacccatcgagcaaatataaaccctttaacgcacctaaattgtcaaatcggaagtggcctgataaccgcataacgcgcgccccacgttggctgtcgacggacctacgtgacggtaatcaatcacttccggatcctatgagtgttgaacagaagaaagagtattttcacaagctagttaatattggctttaaggaaatagaggtgagtttcccgtccgcaagccaaacggattttgatttcacacgatatgccgtggagaatgccccggatgatgtatctattcaatgtcttgttcaatcaagagaacacctaataaagcgcaccgtggaagctctgactggagctaagaaggcaactattcacacctatttagcaacgagcgatatgtttagggagatagtgtttaatatgtcacgggaagaggcaatatccaaggcggtagaggctactaagttagtaaggaagctaaccaaggatgatccgtcccaacaggctactagatggagttatgaattttctccagaatgcttctctgacacgccgggcgagttcgctgttgaaatatgcgaagccgtaaagaaggcctgggagcctacagaggagaatcctatcatctttaatttgcctgcaacagtcgaggttgcttcgcccaacgtatatgccgaccagatagaatacttcgcgactcacatcaccgagagggagaaggtgtgcatctccactcactgccacaatgatcgtggatgtggcgtagcagccactgagcttgggatgctcgcgggggctgaccgagtggagggctgcctttttggtaatggcgagcgcacagggaacgttgatcttgtcaccgtagcgatgaacatgtacacacaaggagtgtcgccaaacctagatttttctgacttgacctccgtcctagacgtggtagagcgttgcaataagattccggttagtcaacgtgcgccatatggtggcgatttagtagtttgcgccttttccgggtcgcatcaagatgcaataaagaagggattcaacctgcagaacaagaaacgtgcacaaggggaaacgcaatggagaattccttatctgcctctggatccaaaagacattggtagggattatgaggcggtaatacgagtcaattcccaatcagggaaaggaggagcggcgtgggtgattctgcgcagtcttggcctagacctgccacgaaatatgcagatagagttttcgagtgccgtgcaagaccatgccgactcgctgggacgagaactcaagtcagatgagatcagtaagctgtttaaagaggcctacaattacaacgatgagcagtatcaggcgatttctctcgtgaactataatgtggaaaagttcggcaccgagcggcgagtgtttacagggcaggtgaaagtcggcgatcaaatcgttgacattgaaggtacgggtaatggacctatatcatccttggtagacgccctgagcaaccttctcaacgtacgcttcgccgtagcgaactacaccgaacactccttgggtagtgggagctcaactcaggcagcgtcctacattcacttaagctatcgacggaacgccgataacgagaaggcatataaatggggggttggggtgagcgaggatgtgggggatagctccgtacgggctattttcgcaaccataaataatattatccattccggcgatgtatctatacccagtctcgcggaagtagaggggaagaatgccgcggcctcggggagcgcctga

SEQ ID NO: 5351 - DNA, 345 bp, Artificial Sequence
  Optimized genes for Saccharomyces cerevisiae
atgtcagaagttattgaggggaacgtcaagattgaccgtataagcccaggcgatggagccacattccctaagacgggggatttagttacaatccattacactgggacactagaaaacggccagaaattcgacagtagcgtagatcgcggttctccctttcagtgtaacattggggtggggcaagtgattaaggggtgggacgtaggtattccgaagttgtcagtcggggaaaaagcgagattgacaattcccggtccttatgcatacggaccccgcggtttccctgggctaatcccgccaaactctacgttggtatttgacgtcgagctcttaaaagttaactag

SEQ ID NO: 5352 - DNA, 117 bp, Artificial Sequence
  Optimized genes for Saccharomyces cerevisiae
atgcagccgataacaaccgcttcaactcaagccacgcagaaggacaaatcatcagagaaaaaggacaattacatcatcaaggggttgttctgggatccggcatgtgtaatcgcttaa

SEQ ID NO: 5353 - DNA, 321 bp, Artificial Sequence
  Optimized genes for Saccharomyces cerevisiae
atggtcaacgttccaaagacacgcaaaacctactgtaaggggaaaacttgcagaaagcacacccaacacaaggtgacacagtataaggctggaaaggcttcgctgtttgcccaaggtaaaaggagatatgaccgaaagcagagcggcttcgggggtcaaactaagcccgttttccacaaaaaggctaagaccactaaaaaggtggtactgcgtcttgaatgtgttaaatgtaagacaagagcccaactcaccttaaaaaggtgcaaacactttgagctaggcggggaaaagaagcaaaaaggacaagctcttcaattctga

SEQ ID NO: 5354 - DNA, 723 bp, Artificial Sequence
  Optimized genes for Saccharomyces cerevisiae
atggtcgcactgatctcaaagaagcgtaagctagttgctgatggtgtattttacgccgagctcaatgaatttttcactcgggagttggcggaagaaggttactcgggagtcgaagtgagggtgactcccactaagactgaagttatcatacgtgctaccagaacccaagatgttctcggggagaatgggcgacgcattaacgaactgacactgttagtacaaaaacgtttcaaatatgctcctggcactatcgttctttacgctgagagggttcaggacaggggcttgtcggctgtcgcgcaggcagagagtatgaagttcaagcttctgaacggcctggcaataaggcgcgctgcctacggagttgttcgctatgttatggagtccggcgcgaagggttgcgaagtggttgtttctggaaagcttcgagcggctcgcgcaaaagctatgaaattcgccgacggtttcttgattcactcgggccagcccgtgaacgattttatcgacacggctacaagacacgttcttatgagacagggtgtcctcgggataaaagtgaaaataatgcgagaccctgccaaatcacgaacaggtccgaaagcactcccagacgctgttacaataattgagcccaaggaagaggaaccgattctagctccatcagtgaaagactacagaccagccgaagaaacagaggcgcaggcggaaccggttgaggcatag

SEQ ID NO: 5355 - DNA, 600 bp, Artificial Sequence
  Optimized genes for Saccharomyces cerevisiae
atgagcgccaacgagttctatagctccgggcagcagggacagtacaatcagcagaataaccaggagaggacaggagctccgaataacggtcaatatggcgcggacaatggcaaccccaacggggagcggggtcttttttcgaccatcgttggaggctcggcgggagcttatgcggggagcaaagtatcaaacaaccattcgaaattgagcggagtcttgggcgctattggcggggccttccttgctaataagatatctgatgagcggaaggagcataaacaacaggagcagtacgggaatagtaatttcggaggtgcgcctcaaggggggcacaataaccaccatcggcaggataataataataataacgggggatttggggggccgggtggacccggtggacaaggctttggacgacaaggaccacaggggttcggtgggcctgggcctcaggaattcggcggccccggaggacaggggttcggagggccgaatccgcaggaatttggaggacccggcggacaagggtttggaggtccaaatcctcaagaattcggtggccaagggcgtcaagggttcaatgggggaagccggtggtga

SEQ ID NO: 5356 - DNA, 1842 bp, Artificial Sequence
  Optimized genes for Saccharomyces cerevisiae
atggcggagggagtcttccagggcgccatagggatagacctaggtacaacctattcgtgcgtcgctacgtatgagtcgtccgtggaaattatagcgaatgaacaaggcaaccgggtgaccccatcatttgtggctttcactcctcaagaacgtctaatcggcgatgctgccaagaaccaagcagctctaaacccaaggaacacagtattcgatgccaaaagactaatcgggcgacgtttcgatgatgagagtgtccaaaaagacatgaaaacatggccatttaaagtcatcgatgtagatggaaatccggtaattgaggtccagtatttagaagagacaaagactttttcacctcaagaaatatccgcgatggtgctgactaagatgaaggagatagcggaagctaagatcggtaagaaagtggaaaaggccgttataaccgtaccggcatacttcaatgacgcacaaaggcaagccactaaagacgctggagcgataagtgggttaaatgttttgaggataattaacgaaccaacggcagcggccattgcttacggtttaggtgctggtaagtccgagaaagagaggcacgtcttaatatttgacctgggcggcggaacatttgacgtaagcttattgcatatcgccgggggggtttatacagtaaagtcaacgagcggaaacacacatctaggtggtcaagattttgatactaacctcttggaacactttaaggccgaattcaaaaagaagaccggtctggatatatctgatgacgcgcgtgcgttgcgccgactacgaacggcagctgagagagccaagagaaccttgtcttccgtgactcaaaccaccgtggaagtagatagcttatttgacggagaggacttcgagtctagtctcactcgcgcacgatttgaagatcttaatgccgccctgtttaagtctacgttggaacctgttgagcaggtgcttaaggatgctaagatctccaagtcccaaatcgacgaggtcgtcctcgttggagggtctaccaggatcccgaaagttcaaaagttactcagcgatttcttcgatggaaaacagttagaaaagtccattaaccctgacgaagcagtagcatatggagctgcagtgcagggcgcaatcctaacaggccagtctacttctgacgaaacaaaggatctgttactgcttgatgtggcaccattgagtctaggcgtaggtatgcaaggagacatttttggtatagttgtccctagaaatacaaccgtacctactattaagcggcgcacttttacaactgtatcggacaaccaaactacggtacaatttccagtgtatcaaggggagcgagtgaactgtaaggaaaatactttactaggagaatttgaccttaagaatatccccatgatgcccgcgggagagccagtcttagaagccatatttgaggtcgatgctaatgggatattaaaagttactgctgtggaaaagtcgaccggcaagtcaagcaatattactatatcgaacgcggtgggacgcttgtcgtccgaagaaattgaaaagatggtgaaccaggccgaagaattcaaagcagctgacgaagcattcgctaaaaaacacgaagcccgacaacggcttgagtcttacgtagctagtattgaacaaactgtaactgacccggttttgagttcaaaattgaaacgcgggagtaagtccaagattgaggctgctctgtcggacgcgctggctgcgctacaaatagaggacccatcggctgatgagctcaggaaagccgaagtaggcttaaagagagtggtaacgaaagcaatgagttcacgttaa

SEQ ID NO: 5357 - DNA, 1302 bp, Artificial Sequence
  Optimized genes for Saccharomyces cerevisiae
atggttaatgtggtactgggaagtcagtggggtgatgaaggaaaaggaaagctggttgatttgttggtaggaaaatacgacatagtagcgcgatgcgctggggggaataatgctggacatacgatagtcgtggatggagttaaatacgatttccacatgttgccatccggacttgtaaatcccaactgtcagaatttactgggtaatggcgtagtaatccacgtaccgtcgttcttcaaagagctagagaccttggaagccaaaggactgaagaatgcgaggtcacgtctcttcgtttcctcgcgggcgcatctagtgtttgacttccatcaagttactgataaattacgagaactagagctctcaggacggagtaaggatggcaagaatattggtacaaccgggaaaggtatcggccccacatactcaacaaaagcctcgcggagtgggctacgagtgcatcatttggtgaatgaccaacctggagcctgggaagagtttgttgcgaggtataaacggcttcttgagactcgccgtcaaagatacggggactttgaatacgactttgaagcaaagttagcagaatataagaaattgcgggaacagttaaagccttttgttgtcgacagtgtagtctttatgcataacgcgatcgaggcgaaaaagaaaattctggtagaaggtgctaatgcactgatgctggacatagactttggtacatacccctacgttaccagtagcaacacgggcattgggggcgtgctaacgggtctcggcattccaccacggactattgatgaaatatatggcgtggtgaaagcctacacaaccagggtaggggaaggcccttttcctaccgaacaactaaatgagaacggggagaagctccagacgataggcgcagagtttggggttacgacagggaggaaacgtaggtgtggttggctagatttggtagtcctcaaatactccactctaataaatggttatacatcgctcaatattacaaagctagacgtactagatactttcaaggaaataccagtaggaattagttactctatacagggaaaaaaacttgatctctttccggaggacctaaatatcctaggaaaggttgaagtcgaatacaaagttctccctgggtgggaccaagatattactaagatcacgaaatatgaggatctcccggagaatgcaaagaaatacctgaagtacatcgaggattttgtaggcgttcctgtagagtgggttggcactggtccggctcgtgaaagtatgctacataaggagattaaatag

SEQ ID NO: 5358 - DNA, 561 bp, Artificial Sequence
  Optimized genes for Saccharomyces cerevisiae
atgggaatagatcatacgagtaaacaacataaaagatcaggccatagaaccgcaccgaaatcagataatgtttaccttaagttactcgtcaaactatacacatttttagcccggaggaccgatgcaccgtttaataaggtcgtcttgaaggcattgtttctcagcaagatcaatcgccctccggtatctgttagtcgaatcgcacgtgcattaaagcaggagggtgctgccaacaagaccgttgttgtagtaggaaccgtcacggatgatgcccgcatattcgagtttcctaaaacaactgtagcagctctgcgcttcactgcaggcgcccgggcaaagatagtcaaagctgggggggaatgcatcacgctcgaccagctagcggtcagagccccaaaggggcagaacacattgatcctccggggcccccgaaactctagagaggcagtaaggcatttcggaatgggaccgcacaagggaaaggcacccaggatcttgtctaccggacgcaaatttgaaagggcccgtgggagacggaggtcaaagggctttaaggtgtag

SEQ ID NO: 5359 - DNA, 435 bp, Artificial Sequence
  Optimized genes for Saccharomyces cerevisiae
atggctggagtatcggtgcgtgatgtagccgcgcaagacttcattaacgcttatgctagctttctacagcgtcagggaaagctggaggtaccagggtacgtagatattgtcaagacatccagcggtaatgaaatgccaccccaagatgccgaagggtggttctataaacgagcggccagcgtagcccgccatatttatatgcgtaagcaggttggggttggtaaactaaacaaactgtatggaggggcaaaatcacggggggtccgcccatataaacacatagatgcgagtgggtcaataaaccgcaaagttttgcaagccttggagaaaattggaattgtagaaatatcacctaaaggaggtcgtaggatctcggagaacggacagagggacttggatcgaatcgcagcacaaacacttgaggaagacgaataa

SEQ ID NO: 5360 - DNA, 894 bp, Artificial Sequence
  Optimized genes for Saccharomyces cerevisiae
atgtccgggccgcccccaccatacgaagaacagtcttcccacttatatggtcaaccagccagtagtcaagatggtaacgcttttataccagaagatttcaagtactcgacagttgttatatcatgtgaacctatcattcggcaacggttcatgcacaaagtctattcgctgctctcctgtcagcttctggcaagcttgtccttctgctattgggctagtgtcagcacctccctgcaaaattttataatgagccacattgccctattttacatttgcatggtggtttccctagtgagttgcatctggctggctgtgtctcccaggcctgaggattatgaagcaagtgtcccagagccgcttctaacagggtcgtctgaagagcccgcacaggaacagaggagattaccatggtacgtgctcagttcatacaagcagaaactaactcttctttcaatattcacactgagtgaagcttactgtctttctctggtgacgttggcctacgataaggacactgtgctgtctgctctgctcatcactactatagtggtggtgggagtgagcttaacggctctcagtgaaaggttcgagaatgtgttgaatagcgcaacttccatatattattggctaaactgggggttatggattatgataggaatggggcttacagcgttgctgtttggttggaacactcactcgtcgaagtttaatcttctatatggctggcttggggcaatacttttcaccgcatatctcttcattgacacgcaattgatattcagaaaagtatatcctgacgaagaggtgaggtgtgctatgatgttgtacttagatatagtaaatcttttcttatctatcttacgaatcttagcaaatagtaacgacgataactaa

SEQ ID NO: 5361 - DNA, 1146 bp, Artificial Sequence
  Optimized genes for Saccharomyces cerevisiae
atgaaagagaacgagttaaagaatgagaaaagcgtagacgttctcagcttcaagcaacttgaatcacaaaaaatagttctccctcaggatctattcaggtccagttttacttggttttgctatgaaatttacaagtcccttgcattccgtatctggatgcttctgtggctaccactttcggtttggtggaagttgagtaataactgcatttatcccctaattgtttcactccttgtcctttttctggggcctatcttcgtcctagtcatttgtggtttgtcacgaaaaagatcattgtctaagcaattaatccagttctgtaaggaggtgactgagaatacgccctccagcgatccgcacgactgggaggttgtcgccgctaacctgaattcttacttatacgagaataaagcctggaatactaagtactttttctttaatgctatggtctgccaggaggcattcagaaccacgttattagaaccgttcagcctaaagaaagacgaagcggcaaaagttaaaagctttaaagactcggttccatacattgaagaagcgcttggggtttatttccgagaggttgagaaacagtggaaactttttaactctgagaagtcttggtccccggttgggcttgaagacgctaagctgcctaaggaggcataccgcttcaagctaacgtggttcctcaagcgcatctccaacatattcatgcttatacctttcctgaactttttgtgctgtatatatgttagtagaggaatgtgtctgttgttaaggacgttttacctcgggtggatcctgttcatgctcgtccaaggcttccagaatatgcggatgatagtactgtctgtaaaaatggagcacaaaatgcagtttctatccaccatcatcaatgaacaagaatcaggagctaatggctgggatgagatagccaaaaagatgaaccgatacttatttgagaaaaaggtctggaagaatgaagaatttttcttcgatggaatcgactgtgagtggtttttctcccacttcttctatcgcgttttatcagccaagaagagtatgcgggctttgtcgctgaatgttgaactctggccttatataaaggaagcacagctttcatgttcagaggaatctctagcgtag

SEQ ID NO: 5362 - DNA, 1440 bp, Artificial Sequence
  Optimized genes for Saccharomyces cerevisiae
atgtcggcaattctcagtacgactagtaaaagttttctgagccggggatcgaccagacaatgccaaaatatgcagaaggccctattcgctttactcaatgcgcgtcactacagcagtgcgagcgaacagacgctcaaagaaaggttcgcagaaatcatacctgcaaaagcggaggaaataaaaaaattcaaaaaggaacatggcaagacagtaatcggggaagtgctcttagaacaggcatacggggggatgcgtggcataaaagggctcgtatgggaaggcagcgttttggatcctgaagaaggcattcgtttcaggggccgcacgataccggagatccagcgtgaattgcctaaagccgaaggctcgaccgaacctctacccgaggcgcttttctggctactgttaactggggagatacctaccgatgcgcaggtgaaagcgctcagcgctgacctggcagcgcggtcagaaataccagaacatgttattcagctcttggactctctgccgaaggaccttcatcccatggcgcagttctccattgctgtcactgcgctcgagtcggaatctaaattcgctaaggcttatgcgcagggagtgtcgaagaaggaatactggagttacacttttgaagacagcctagatcttctcggtaaactaccagtaatcgcgtcgaaaatatatcgcaatgtttttaaggatggaaaaatcacctctactgaccctaacgccgattatggcaagaacttggctcagttgttggggtacgaaaacaaagattttatcgacctgatgaggctgtatttaacgatacatagtgatcatgagggtggcaatgtgagtgcacataccacccatctggtgggatctgccctaagctccccatatctttccctggctgcgggtcttaacggactcgcggggcctctccatggtcgtgccaatcaggaagtactggaatggctatttaagctccgggaagaagtgaaaggagattactctaaagaaactatagagaagtacctctgggatacgcttaatgcaggacgagtcgtcccaggatacggccacgcggtactaagaaagaccgacccgaggtacaccgcgcagagggaatttgctttgaagcactttccggactatgagctcttcaagttagtctcgacgatttatgaagtagcacctggagtacttacaaaacacggtaagacgaaaaatccctggccgaatgtggacagtcacagcggcgtccttctccagtattatgggctgaccgaagcttcattttatacagtgctcttcggcgttgcacgtgctattggggtattaccccaacttattattgaccgagcagtcggcgctccaattgagaggcctaagtcctttagtactgagaaatacaaggagttagtgaaaaaaatagagtcaaagaattag

SEQ ID NO: 5363 - DNA, 6702 bp, Artificial Sequence
  Optimized genes for Saccharomyces cerevisiae
atgagcgaagagagtctctttgaatcgagcccccagaagatggaatatgaaataacgaactattccgagaggcatactgaacttcccggtcattttataggtttgaataccgtagataagctcgaggaatcgcctttgagagatttcgtgaagtctcacgggggccacaccgttatatcaaagattctcattgctaataatgggattgccgcggtgaaggagattagatctgtacgtaagtgggcatacgagactttcggcgatgatcggaccgtgcagttcgttgcaatggccacaccggaggacttagaggcaaatgccgagtacataaggatggcggatcaatacatcgaagtcccaggaggcacaaacaataataattacgctaatgttgatctgatagtagacatagcagagcgggccgatgtggacgcggtctgggccggatggggccatgcttctgaaaaccctctactccctgagaagttgagtcagtcaaaaaggaaggtcatctttattggcccacctggtaatgcgatgaggtcgttaggagataagatcagcagtaccatcgttgcacaatcggcaaaagtcccgtgtataccatggagcggcacaggggtcgataccgtgcacgtcgacgaaaaaactggtcttgtatcggtagatgatgatatatatcaaaaaggctgctgcacgagcccggaggacggtctgcaaaaggcaaaaagaattggtttccctgtcatgataaaagcttcagaagggggaggtggcaagggcatacgacaggtcgaacgcgaggaagacttcattgcgttatatcaccaagcggcgaatgagatacccggcagtccaattttcatcatgaaactagccggtcgagcgcggcacttggaagtccaactcttggcggaccaatacggaacgaacatctcattatttgggagagactgttctgtacagcgtcgccaccagaaaatcatcgaagaagccccggtaacgatagcgaaggcggagacattccatgaaatggaaaaggctgccgttaggctagggaagctcgtaggatatgtctcagccggcaccgtggaatacctatactcacatgacgatgggaagttctactttctagaattgaacccccgtctccaagtagagcatcctactacagagatggtcagtggggtcaacttaccagcggcacagttacagattgctatgggaattccaatgcatcgtatctcagatatacgtacgctgtacggcatgaatccacactctgcctccgagattgatttcgagtttaaaactcaggacgcaacaaaaaagcagcggcgcccgattccaaaaggccactgcacagcctgcagaatcactagcgaggatccgaatgatggattcaagccctcggggggaacgctgcatgaattaaactttaggtctagttccaacgtttggggatatttcagcgtaggaaataatggaaatatccactcgttttccgactcccagtttggtcacatcttcgcattcggtgagaatagacaagcatccaggaagcatatggttgttgcacttaaggagttgtcgatcagaggtgatttcaggacaacggtggaatatcttatcaaactccttgaaaccgaggattttgaggacaatacgatcacgactggttggctggatgatctgataactcacaaaatgaccgctgaaaaaccggacccgacgctggcggtaatatgcggggctgcgacaaaggcgttcctcgcctcagaagaggcccggcacaaatacatagaatcgttgcagaagggccaggtcttatcgaaagacttgttgcagactatgttccccgtagatttcattcacgagggcaaacgctataagtttaccgtagcaaagagcggtaatgaccgatacacattgttcatcaatgggtcaaaatgcgacataattctacggcagctttcagatggaggactgctgatcgcaattggcggtaaaagccacaccatatattggaaggaggaagtagccgcaactcgtctatctgtcgattcaatgactaccctcctcgaagttgagaacgatcctactcaactacgaaccccatcccccggaaaactagttaagtttctcgttgagaatggcgagcatattataaagggacagccatatgcagaaatcgaggtgatgaagatgcagatgccgttagtatctcaagagaatgggattgtgcaattgcttaaacaacctggttccacgattgttgcaggggacataatggccattatgactcttgacgatccctctaaagtaaagcacgcattgccctttgaaggtatgttaccggattttggatcgcccgtgattgaaggtacaaaacctgcttataaatttaagtcacttgtcagtactttggagaatatcttgaaggggtatgataaccaggtaataatgaatgcatctttgcagcaactaatcgaggttttaagaaatccaaagcttccttattcggaatggaagctgcatatcagtgctctgcactcccgactgccggccaagctcgacgagcaaatggaggagctagttgctcggtctctacgaaggggagccgtatttcccgcccgacagctctccaagttaatcgatatggcagttaagaatccggaatacaaccccgacaagcttctcggggctgtagtagaaccgttggcagatatcgctcacaaatattccaatgggttagaagcgcatgaacactctatctttgtgcatttcttggaggagtactatgaagtagagaaactctttaacgggcctaacgtaagggaagaaaacataatcctgaagttgcgcgatgagaatccgaaggaccttgacaaggtcgctctcacagtcctgtctcactccaaggtttcagcaaagaacaacttgattctagccatattgaaacattaccaaccattatgcaaactttcctcaaaggtctcggccatttttagcacgccgctgcagcacattgttgagttagaatcgaaagctaccgccaaggtcgccctgcaggcgcgagagattctcattcaaggtgcgctaccatctgtaaaagagcgtactgagcaaatcgagcacatacttaagtcgtccgtggtcaaggtggcatacggttcttctaaccctaaaagatccgaaccggatcttaatatcttaaaggatctaatcgattcaaattatgttgttttcgatgtcttactccagtttttgacccaccaggatcccgtcgtaacggcggcggccgctcaagtttacataaggagagcataccgcgcctacactattggcgacattcgcgtccatgagggcgtaacagttcccatcgttgaatggaagttccagttaccgtcggccgcgttttccacctttcctacagttaagagtaagatgggtatgaaccgcgctgtctctgtaagtgatttatcttatgtggcaaacagtcaatccagtcccctacgggagggtattctgatggctgttgatcaccttgatgatgttgacgagatattgagccagtccttggaagttataccgcgccatcagtcgtcatctaacgggcccgcaccagatcgaagcggatctagcgcgagcttatcaaatgtagccaacgtctgtgtggcgtccacagaaggctttgagtccgaggaagagatactggttagattgcgtgaaatactcgacctcaataaacaggaattgataaatgcctctatccgaagaataacatttatgtttggattcaaagacggaagttatcccaaatattacacctttaacggccctaattacaacgagaacgagactattcgccatatagagccggcgctcgcgtttcaactggaattaggtcgactctctaacttcaatatcaagccaattttcactgacaatagaaacatccacgtatatgaagcggtgtcaaagacaagccctttagataagaggttcttcactcgaggcattatacgaaccggacatatccgcgatgacatttccatccaggaatacttgacgtctgaggcaaatagattgatgagtgatatcttggacaacctcgaggttactgacacatcaaattctgatttgaaccacatattcatcaactttatagctgtcttcgatatcagccccgaagatgtggaagccgcctttggaggtttcctagagcggttcggaaaacgactattaagacttcgcgtttcgtccgccgagatacggatcataataaaggatcctcagacaggcgctccagtacctttacgagccttgatcaataatgtcagcggatatgttattaagactgaaatgtatactgaagtcaaaaatgctaagggtgaatgggtgtttaagtcccttggcaaacctggaagtatgcatttacgtcccatagcgacaccgtacccagtcaaggaatggctccagccgaagaggtataaggcgcaccttatgggaactacctatgtttatgattttcctgaattatttagacaagcgagttcatcacaatggaagaatttttcagccgacgttaagctaaccgatgatttctttatcagcaacgagttaatcgaggatgagaacggggaactgacagaagtagagcgcgaaccaggggctaacgcaataggaatggtggcgtttaagattacagtcaaaactccagaatacccacgtggtagacaattcgtcgtcgttgcgaacgacatcacatttaaaatcggcagtttcggcccccaagaagacgaattctttaataaggttactgaatacgcgcgcaaacgcgggattcctcgcatatatcttgcagcgaatagtggcgccaggatagggatggctgaagagatcgtgccactcttccaggtggcatggaacgatgcggcaaatccggacaaagggtttcaatacctttatttgaccagtgagggtatggaaacgttaaaaaaatttgacaaggaaaatagcgttctaacggaacgaactgtcatcaatggagaagaaaggttcgtgataaaaactattattggttctgaggacggtctcggggtagaatgcttgagaggctcaggtctgatcgcgggtgcaacgagtcgcgcgtaccatgatattttcaccatcactctggtcacatgccgttctgttggtatcggtgcttatctcgtaagattgggccaacgtgcgattcaggtggaaggacaacctataatactaactggggcgccagcgattaacaagatgctcggccgcgaagtttacacttccaacttacagctcggaggtacgcaaatcatgtacaataatggggtgagccaccttactgcggtagacgacctggcgggcgttgaaaaaattgtagaatggatgtcgtacgtaccagccaagagaaatatgccggttccaatccttgagacaaaagatacatgggaccgaccagttgacttcactcctactaacgatgaaacgtacgacgtacggtggatgatagagggcagagagaccgagtctggtttcgagtacggcctgttcgataagggaagcttttttgagacattatcaggctgggcgaaaggggttgtcgtgggcagagcccgtctgggggggatcccgttgggggtaataggcgttgagacaaggacagtagaaaaccttataccagcggatcctgcgaacccaaacagcgctgaaacccttatccaagaacccggtcaggtttggcaccccaattctgcgtttaaaactgctcaagccataaacgattttaataatggtgaacaactacccatgatgatacttgccaactggcgagggttctctggtggccaaagagacatgtttaatgaggtcctcaaatacggctcattcattgttgacgcgctggttgactacaaacagcctatcatcatatatattccaccaaccggagaacttcgaggtggcagttgggtggttgtcgacccaaccatcaatgcagaccaaatggagatgtatgctgacgtgaatgcacgggcgggggtccttgaaccacaggggatggtaggcattaagttccgacgggaaaaattacttgatacgatgaatcgtctagacgataagtatcgtgagctgaggtcacaactgtcgaataagtcattggcgcccgaagtccaccaacagattagcaagcagctcgctgatagggaacgggagcttctcccgatttatggacagatatcgttgcagttcgcggatctgcatgaccgttccagccgtatggtagctaagggagtgatcagcaaggagttagaatggaccgaagcccggcgatttttcttctggcgactgaggcgccggttaaacgaggagtatctgattaagaggctatctcatcaagtgggagaggcgagcagactggagaagatcgcgcggattcggtcctggtatcctgcatcagtggatcacgaggacgatcggcaagtcgccacgtggattgaggagaactacaagaccttagatgataagttgaaaggactcaaactggaatcttttgcgcaagatttggctaagaagatccgctccgaccatgacaatgccattgacgggctatcagaagtaattaagatgttgagtacagacgataaagagaagttacttaaaactttaaagtag

SEQ ID NO: 5364 - DNA, 765 bp, Artificial Sequence
  Optimized genes for Saccharomyces cerevisiae
atgtctggatacgacagagccctctcgattttcagtcctgacggtcatattttccaagtcgaatatgcacttgaagctgtcaagcgtgggacctgcgcggtcggcgtgaagggaaaaaattgtgttgtgctgggttgtgagcgacgttcaaccctcaaacttcaggatacccgtataacgccatcaaaggtaagcaaaatcgatagccacgtagtcctcagtttttctggcctgaacgcggactcccgaatactcatagagaaagccagggttgaggcacaaagccaccggttgacattggaggaccctgtgactgtcgaatacctcacgcgatatgtcgccggtgtccaacaaaggtatacgcaatcgggtggggtgcgtccttttggtgtgtcaacgcttatcgccgggtttgatcccagagacgacgagccgaaattgtaccaaactgagcctagtggaatttacagttcgtggtcagcgcaaaccattggacggaacagtaaaacagtgcgcgagttcctcgagaaaaattacgaccgtaaagagccacctgctacagtcgaagagtgtgtcaaactcacggttaggagtcttctagaggttgtccaaactggtgcaaagaacatagagattacggtggtaaaaccagattctgatatcgtagcactctcttcggaagagatcaatcagtatgttactcaaattgagcaggagaagcaggaacagcaggagcaggacaaaaaaaaaaagtctaaccactga

SEQ ID NO: 5365 - DNA, 321 bp, Artificial Sequence
  Optimized genes for Saccharomyces cerevisiae
atgaaatacctggcagcatatttgttgctcaatgcagcgggaaatacaccagacgccactaagattaaggccattcttgagtccgttggtattgagatcgaggatgaaaaggtctcatcagtgttatcggccctggagggtaagtcagtggatgaactaatcactgaaggtaatgaaaagctggcggcagtgcccgcggccgggccggcatccgccggaggcgcagctgcagcttcaggtgacgctgctgcggaagaagaaaaagaggaagaggctgctgaggagagcgacgacgatatgggattcggattgtttgattag

SEQ ID NO: 5366 - DNA, 429 bp, Artificial Sequence
  Optimized genes for Saccharomyces cerevisiae
atgtcccaagctgtgaatgccaagaagcgcgtattcaagacacattcataccgtggagttgatctagagaaacttctggaaatgtctacagaggactttgtcaaactcgctcccgcacgcgtgaggaggagatttgcacgtggaatgacctctaagcctgcggggttcatgaaaaaattgagggcggctaagttagctgcgccggagaatgagaagccagctcccgtacgaacacatatgagaaatatgatcatcgtgccggagatgattggctctgtagtcggcatttacaatggaaaggcctttaatcaagttgaaatacgccccgagatgcttggacactatctgggtgagttttccataacgtataccccggtccgccatggtagagcaggcgccaccacatcaagatttattccacttaagtaa

SEQ ID NO: 5367 - DNA, 1263 bp, Artificial Sequence
  Optimized genes for Saccharomyces cerevisiae
atgagtaaagggaaggtgtgcctcgcatatagtggtggtctagacacatccgtcatcctcgcatggttgttggaccaaggctacgaggtagtggccttcatggcaaatgtaggccaagaagaagattttgatgctgcgaaagagaaagccctcaaaataggagcctgcaagtttgtttgcgtagattgccgcgaggactttgtaaaggacatcttgttcccggcagttcaagtgaacgcagtatacgaggatgtctatctcttgggcacctctctcgctcggccggtcatcgccaaagcacaaatagacgtagcaaagcaggaaggatgctttgcagtatctcacgggtgtaccggaaaagggaacgatcaaattcgtttcgagctatcattctacgcgctgaaaccagacgtgaagtgtataactccctggcgaatgcccgagtttttcgagcggttcgcgggtcgtaaagacctattggattacgcggcacagaagggtatcccggtagcgcaaaccaaagccaaaccatggagcactgacgagaatcaggcgcatattagctacgaagctggtattttagaagaccctgacacaaccccaccgaaagatatgtggaaactcatcgttgatcccatggatgcacctgatcagccgcaagacttaacgattgactttgaacgaggtttacccgtgaaacttacgtatacagacaacaagacttcgaaggaggtcagcgtgaccaaacctttagacgtcttccttgccgcgtccaacctggctcgtgccaacggcgtcggacgcatcgatatagtcgaagatcggtatatcaacttaaaatctaggggttgctatgaacaggcgcccttaaccgtacttcgcaaggcgcatgttgatcttgagggccttacgttagataaagaagtaagacaactacgcgatagttttgttacaccgaattatagccgcttaatctacaacgggtcgtatttcactcctgagtgcgaatatataaggtccatgatccaaccttctcagaattctgtaaacggaactgtcagagttagactttacaaaggtaatgtaatcatcctgggtcggtctacaaagactgagaaactctatgacccaacagaaagttctatggatgaactcactggcttcttgccgacggacaccacgggcttcatcgccattcaggcgatcaggataaagaagtatggtgaaagcaaaaaaaccaagggcgaagagttgacattgtga

SEQ ID NO: 5368 - DNA, 1047 bp, Artificial Sequence
  Optimized genes for Saccharomyces cerevisiae
atgagcatacctgaaacgcagaagggtgttatattctatgaatcacatggcaaactagaatacaaggatattccggtacccaaaccgaaggcgaacgagttgttaatcaatgtcaaatactcgggcgtttgccacacggacttacacgcatggcacggggactggcccctaccagtgaaattaccgcttgttggaggacacgagggcgccggggtggtggtcggaatgggagaaaatgtgaagggttggaagatcggtgattacgcgggcatcaaatggctcaacgggtcatgtatggcttgtgaatattgcgagctgggaaatgagtctaactgccctcatgctgacctgtctggctatacacacgacgggtcctttcagcaatacgcaacggctgatgcggtgcaggctgcccacatccctcagggaactgacctggcacaagtcgcaccgatcctgtgcgctggcataactgtttataaagcgctcaaatctgcaaacctaatggcgggacattgggtagctatctcgggtgcagcaggtggcttgggtagtcttgcagttcaatacgcgaaggctatgggttatcgggtattagggatagatgggggggagggtaaggaagagctatttcgtagtattggcggggaggttttcattgatttcaccaaggagaaggacattgtaggggcggttctgaaagcgacagacggcggtgcgcacggtgttattaacgtttcagtaagcgaagcggctatcgaggcatcgacccgatatgtccgcgctaacggcacgaccgttctggttggtatgcccgccggcgcaaagtgttgttcggacgtcttcaatcaggtggttaaatcgattagcatcgttgggtcgtacgtcggtaatagggccgacactcgggaagcccttgacttctttgcccgaggactagtaaagtctccaatcaaggtcgtggggctatccacacttccggagatctacgaaaaaatggaaaaaggtcagatcgtaggtcggtacgtagtcgacacttccaaatag

SEQ ID NO: 5369 - DNA, 342 bp, Artificial Sequence
  Optimized genes for Saccharomyces cerevisiae
atgtcggaaatacagaacaaagctgaaactgcggcgcaagacgtacaacagaaactcgaagagactaaagagtctcttcaaaataaagggcaggaggtgaaggaacaagcggaagcctctatcgacaatttaaaaaacgaggctactccggaagccgagcaagttaaaaaggaagagcaaaatattgctgatggtgtagaacaaaagaaaaccgaagctgctaacaaagtggaggagacgaagaaacaggcgagcgccgccgtttctgagaaaaaagaaaccaaaaaagagggagggttcttgaagaagctcaaccggaagattgccagcatttttaactaa

SEQ ID NO: 5370 - DNA, 561 bp, Artificial Sequence
  Optimized genes for Saccharomyces cerevisiae
atggggattgatcacacgtcgaaacaacataaacggtcaggtcaccgcactgcccccaagtcggataacgtgtatcttaagctgttagtaaagctgtatacatttttagcacgtaggacagacgctccttttaataaggttgttctgaaggctttgttcttgtccaaaatcaatcgaccgccagtgtccgtctcgcgaatagcacgcgcactcaaacaagagggcgcggcaaataagacggtggttgtagtagggacagtgacggacgacgcccgcatttttgaatttccaaaaactactgttgcagcgctacgatttacagcaggtgcaagagctaaaattgtcaaggcgggaggtgagtgcatcactctcgaccaactcgcagttcgtgcgcctaagggccagaatacgctcatcttacgaggtccgcggaattctcgcgaggcggtgaggcacttcggtatgggaccccacaagggaaaagctccacgcattcttagcactggccgaaagtttgagagggccagggggcgccggcggagcaaggggttcaaagtataa

SEQ ID NO: 5371 - DNA, 429 bp, Artificial Sequence
  Optimized genes for Saccharomyces cerevisiae
atggcgccatcggctaaggcaaccgctgcaaaaaaggctgtcgtaaaagggacgaacggtaaaaaggctcttaaagttcggacatccgccacatttaggcttcctaaaacccttaaattggcaagggcacccaaatatgcctcgaaagccgtcccacactacaatcgactcgattcttacaaagtcatagaacaaccgattaccagcgaaaccgccatgaaaaaagtggaggatggtaatattctcgtcttccaggttagcatgaaagcaaacaaatatcagattaagaaggcagttaaggaattatatgaagttgatgtcttgaaggtgaacactttagttcgacccaatggaacaaaaaaagcatatgtaagactgaccgcggattatgacgccctagatattgcgaacaggataggctatatctga

SEQ ID NO: 5372 - DNA, 321 bp, Artificial Sequence
  Optimized genes for Saccharomyces cerevisiae
atgagtacgctactgaagtctgctaaatccatcgtaccactaatggatagggtacttgttcaacgtataaaggctcaggccaagacagcatcgggactgtatttaccagagaaaaatgtggaaaagctaaatcaagctgaggtggtagctgttggtcccggcttcacagatgcaaatggaaacaaagtagtgccccaggtaaaagtcggcgatcaagttttgattccccagttcggcggatctacgataaaacttgggaacgatgacgaagtaatattgtttcgtgacgcagaaatcttggcaaaaatcgccaaggattaa

SEQ ID NO: 5373 - DNA, 186 bp, Artificial Sequence
  Optimized genes for Saccharomyces cerevisiae
atggacggtatgtttgctatgcccggggctgcggccggggccgccagcccacaacaacccaaatccaggttccaagccttcaaggaaagtccattatatacaatcgcgctgaatggcgctttcttcgttgcaggtgttgctttcatccaatcgccacttatggatatgctagccccacagctataa

SEQ ID NO: 5374 - DNA, 1164 bp, Artificial Sequence
  Optimized genes for Saccharomyces cerevisiae
atgagtcaccgtaagtacgaggcgcctcgccacggtcatctcggcttcctgccgagaaagcgagcagcatcgatcagagcgagagtgaaggcgtttcctaaggatgacagaagcaaaccagttgcgctcacatcttttcttggatacaaggcgggtatgactactatagttcgagatttggatagaccaggatcaaagttccacaaacgcgaggtagttgaggccgtgacggtagttgacactccaccagtcgtcgtcgtgggcgttgtagggtacgtggagacgccgcggggattgcgttcactcaccacagtctgggcggagcatttatctgatgaagtaaaacgtcgattctacaaaaattggtataaatcaaaaaaaaaagcttttactaagtactccgccaaatatgcacaagatggtgctgggattgagagggagttagctcgtattaagaaatatgcctcagtcgtgcgagtgcttgtccacacgcagattagaaagactccccttgcgcaaaagaaagcacatttagcagaaatacagctcaatggggggagtatctctgagaaagtagactgggcccgcgagcacttcgagaagacagtggcggtagattccgtatttgaacaaaacgagatgattgatgcgatcgcagtaactaaaggccacggcttcgaaggagtcactcatcgatggggcacaaaaaaactaccacgtaaaactcaccgcgggctccgtaaagttgcctgcataggggcatggcatcctgcgcacgtgatgtggtcagtagctcgcgcaggccaaagagggtatcattcccggactagtataaatcacaaaatttaccgagtggggaaaggggacgatgaagctaacggagctacctccttcgatcgtactaagaaaactataacaccgatgggaggcttcgtacattatggggaaatcaaaaacgattttataatggttaaggggtgtattcctgggaatcgtaagagaatagtgactttaagaaagagcttatataccaatacttcaagaaaagcgctagaagaagtcagtctgaaatggatcgacacggcttcaaaattcgggaaggggcgcttccaaaccccggcagaaaagcatgccttcatgggaaccttgaaaaaggacttatga

SEQ ID NO: 5375 - DNA, 573 bp, Artificial Sequence
  Optimized genes for Saccharomyces cerevisiae
atgagtgcaccccaagccaaaatccttagccaagctccaacagaattggagttgcaagtcgcccaggcttttgtggaattagagaatagtagtccggagctcaaagcggagcttcgtccacttcaatttaagtcaattagagaaatcgacgtggctggaggcaaaaaggcactcgctatttttgtaccggtcccatccctcgcgggattccataaggtccaaactaaactgacacgcgaactagaaaaaaagttccaggataggcatgtgatcttcttagccgaacgccggatcctgccaaaacctagtaggactagtcgacaagtacaaaagcggccacgcagtcggaccctaacagctgtacacgacaagatattagaagacctggtgttccccacggaaatcgtaggcaaacgagttagatatctcgttggaggaaacaaaattcagaaggttctactggactcgaaagatgtgcaacaaattgattacaagctcgagtcgtttcaagccgtatataacaagttaaccgggaagcaaatcgtgtttgagatcccttcagagactcattaa

SEQ ID NO: 5376 - DNA, 381 bp, Artificial Sequence
  Optimized genes for Saccharomyces cerevisiae
atgagttggcaagcttacacagacaacttgattgggaccggtaaggtcgacaaagccgtaatctattcacgcgcgggagatgcggtttgggcgacgagtggcggtctttcgctccaaccaaacgaaatcggcgagatagtccaaggcttcgataaccctgctggtctacagagcaacggtttgcatattcagggtcaaaaatttatgctgctaagggcggatgaccgcagtatatacggtcgccatgatgcggaaggggtggtctgtgtacggactaaacagacggttatcatcgcgcactatccccctacggtccaggcaggggaggccactaaaattgtggagcagctcgcagactacctgattggagtgcagtactaa

SEQ ID NO: 5377 - DNA, 2529 bp, Artificial Sequence
  Optimized genes for Saccharomyces cerevisiae
atggtggccttcacagtggatcagatgcgatcactcatggacaaagtgacgaatgtaaggaatatgtccgttatcgcgcacgtagatcacggaaaaagcactctcacggactccctcgtgcagcgggccggcataatttcagcggctaaggcgggtgaagcaaggttcactgatacccgcaaggatgagcaagaacggggcattacaataaagagcacagcaatcagcttgtactcggaaatgtcagacgaagacgtaaaagaaataaagcaaaaaactgatgggaattcgtttttgataaatctcattgactctccgggacatgtcgacttttctagtgaggttactgccgccctacgagtaaccgatggagcactagtcgtggttgatacaatagaaggcgtgtgcgtgcaaactgagacagttttacgccaagccttgggagaacgtattaagcctgttgtagtgataaataaagtagaccgtgctctactagagctacaggtttccaaagaggatctttaccaaaccttcgcccgtacagtggagtctgtgaatgtaatagtcagcacgtacgccgacgaagtactgggcgatgtacaggtgtatcctgccaggggaaccgttgcgtttggtagcgggctgcatggatgggcctttacaattaggcagtttgccactaggtacgcgaagaagtttggggttgataaggcaaaaatgatggaccggctgtggggagatagcttctttaatcccaaaaccaagaaatggaccaataaagacacagatgctgagggtaagccccttgagagggcgtttaacatgtttatccttgatccaattttccggctttttacagcaatcatgaactttaaaaaggacgagatacccgtgttacttgaaaagttagaaatagtcttaaaaggggatgagaaggatctcgagggtaaggcccttctaaaagttgttatgagaaaattccttcccgccgcggacgcgctcctagaaatgatcgttctacatttgccgagtcctgtgacggcgcaggcgtatcgggcggagcagctctacgagggtcctgctgatgatgcgaactgtattgctatcaagaattgtgatccgaaagcagaccttatgttgtatgtatccaaaatggtccccacgtccgacaaggggcgcttttatgcattcggacgcgttttcgcagggaccgtcaaaagcggccagaaagtacgcatccaggggcccaactatgtgcctggcaaaaaggacgacctctttatcaaagcgatacagagggtggtacttatgatgggtagatttgtggaaccaattgacgactgccctgcgggtaacattattggactagtgggaatagaccaatttctgctaaaaaccggaacgctgacgacatcagaaacggctcacaatatgaaagttatgaaattctctgtatcaccagtagtgcaagttgccgtcgaggttaaaaatgctaacgacctcccgaagttagttgaggggctcaaacgactaagcaaaagcgacccttgcgttcttacttatatgtcagaaagtggtgagcatatagtagcaggcaccggggagttacatttagaaatttgcttgcaggaccttgagcacgaccatgcgggggtaccacttaaaatctctcctccagtagttgcctacagggagaccgttgagtcggagagctcccaaaccgcgcttagcaagtccccgaacaaacacaataggatataccttaaagccgagcccattgatgaggaagtcagtctagcgatcgagaacggcattatcaatccccgtgatgacttcaaagccagagcgaggataatggctgatgattatgggtgggatgtgacagacgccaggaaaatctggtgtttcggtccggatggcaatgggcctaatttagtgatagaccaaacgaaagccgtgcagtatttacacgaaattaaggattcagtagtggctgcctttcagtgggcaacgaaggagggacccatctttggcgaagagatgcggtcagtccgtgtcaacatactcgacgtgacgctccatgcggatgcgattcacaggggaggcggccagataatacccactatgcgtcgagcaacttacgctggatttttattggcagacccaaagattcaggagcccgtattcctggtagagatccaatgccctgaacaggccgtagggggtatctactccgtcttaaataaaaaaaggggccaagttgtttccgaagaacagcgacctggtacccccttgttcacagtgaaggcgtacttacccgtcaatgaatcgttcggatttactggggagctgaggcaggcgaccggcggacaggctttccctcaaatggtttttgaccattggtcgacgttgggcagtgaccccctggatcctactagcaaggcaggcgagatcgttctcgccgcgagaaagcggcacggaatgaaggaagaagtaccggggtggcaggagtactatgataaactctaa

SEQ ID NO: 5378 - DNA, 1110 bp, Artificial Sequence
  Optimized genes for Saccharomyces cerevisiae
atgttacgtaacactttttttaggaacacatcacgccggttccttgccaccgttaagcagccgagtataggacggtatactgggaaacccaacccatcgacagggaaatatacggtgtcgttcatagagggggacggcataggccctgagatttccaaaagcgtcaaaaagattttcagcgcggcaaacgtgcccatagagtgggaaagttgtgacgtgtcgccgatctttgtcaatggcttaacgacaataccagacccggccgtccaaagtatcaccaagaaccttgtagccctgaagggtccgctggccacgccaatcggtaaaggacacagaagccttaatttaaccttaagaaaaacctttggcttgtttgcgaatgtaagaccggcaaaatcaattgagggatttaagacgacatacgagaatgttgacttagtattaatccgtgagaatacggagggagaatatagtgggatagagcatatcgtatgccccggggtagtacaatccatcaaactaatcacacgcgatgcaagcgaacgagttattcgctacgctttcgaatatgcacgagctataggtcgacctagggtcatagtagtccacaagtcaacaattcaacgattggccgatggattgtttgttaatgtggccaaagagttaagcaaggagtatccagacttaacacttgagaccgaactgatagacaactcggttctaaaagtggtgaccaacccatctgcatatactgatgcggtatctgtctgtccaaacctatatggggatattctttcagatttaaactcaggattatcggcgggctctttaggtctaacaccctccgcaaatatcggacataagatttcgatatttgaggccgtacatggttccgctccggacatcgctggtcaagacaaagcgaacccaacagctctcttgctgagctcggttatgatgcttaaccacatgggtctgacaaaccacgcagatcaaattcagaatgctgtgctatcaactatagcgtcgggtccggaaaatcgaaccggggacttagccggcaccgctactaccagtagtttcacagaagcagtgataaaaagattatga

SEQ ID NO: 5379 - DNA, 192 bp, Artificial Sequence
  Optimized genes for Saccharomyces cerevisiae
atggccaaggttcatggttcattggcgcgggcaggaaaagttaagtctcaaactcccaaagttgagaaaactgagaaacccaagaaaccgaagggtcgggcctataaaagactgctatataccagacgctttgtgaacgtgacgcttgtaaatggtaagcgacgaatgaatccaggcccgagcgtgcaatag

SEQ ID NO: 5380 - DNA, 1314 bp, Artificial Sequence
  Optimized genes for Saccharomyces cerevisiae
atgccgaaaaaggtctggaaaagcagcacgccatccacctatgagcatatatcctcccttcgacctaagtttgtgagtcgggtcgacaatgtgttgcatcaaaggaagtctttaacttttagtaacgtcgttgtccccgacaaaaaaaataacacacttacgtcatcagtcatctattctcaagggagcgacatttacgaaatcgatttcgctgtaccccttcaggaagccgcttccgagcccgtcaaggattacggggatgctttcgaaggcatagaaaatacaagtctttctccgaagttcgtctatcaaggcgaaacagtatcgaagatggcataccttgacaaaaccggcgagaccactctattatcaatgagcaagaacggcagtctggcctggtttaaagaagggattaaagttccgatccatatagtccaagaattgatggggcctgctaccagctatgcgtcgatccatagtctaactagacccggagatcttccggagaaggacttttcgctggctataagtgacttcggcatctcaaacgatactgagaccatcgtaaaaagccaatcgaacggagacgaggaggacagcattctaaagatcatcgataacgccggtaaacccggggaaatacttaggacggtccatgtcccaggcacgaccgttacacatactgttaggttttttgataaccacatatttgcctcgtgtagcgatgacaacatacttagattttgggacacacgcacatcagacaaacccatctgggttctaggcgaacccaaaaatgggaagctcacctctttcgattgctcacaggttagcaataatctctttgtgaccggtttttcgaccggaataatcaaactctgggatgctcgtgcagcagaagcagcaaccactgacctcacatataggcaaaatggagaagatccaatacagaatgaaatagcaaatttttatcacgcagggggtgacagtgttgtggacgtacagttttccgccacctccagctctgagttttttacggtcggtggaactggaaacatctatcactggaacaccgactattcactcagtaagtataaccctgatgacacgatcgctccgccccaggatgcaactgaagaaagtcagacgaaatctcttcgatttttgcataagggaggttcgagaagatcgccgaagcagatcgggcgacggaacacagccgcgtggcatccagtaattgaaaatcttgttggtactgtcgatgatgacagtcttgtgagcatttacaagccatacactgaagagtcagagtga

SEQ ID NO: 5381 - DNA, 324 bp, Artificial Sequence
  Optimized genes for Saccharomyces cerevisiae
atggcagagagccacagactttatgtaaaaggcaagcatctgtcttaccaaaggagtaaaagagtgaataaccccaacgtatcgcttatcaaaatagagggggtcgccactccacaggaagcccaattttacttgggcaagcgcattgcgtacgtttaccgtgcttcgaaagaggtacggggaagcaaaattcgagtgatgtgggggaaggtgactcgcacccacggtaatagtggcgtagtacgggccacgtttagaaacaacctaccggcaaaaacgttcggagctagcgtacgcatattcctatacccaagtaatatataa

SEQ ID NO: 5382 - DNA, 633 bp, Artificial Sequence
  Optimized genes for Saccharomyces cerevisiae
atgcttcagagtgttgttttttttgcacttttaacattcgcatcatctgtttcagctatatatagtaacaatactgtttccaccacaacgaccctggctccttcgtattctttggtcccgcaagagacaaccatttcatatgcagatgatactactacgttttttgtgacctcaactgtttattctacgtcttggtttacatccacgtcagccaccattactaatgcggcctcatcctctctgagcacaagttctgcgtcaggtagtgtgactccagaatcgacgcatgagattacgtctacatctaccattacctccaccctccttttaacattgcacgatagtacaactctgagccctagcagtacggcagcttcggtctccgacgaagattctaacaataaagacgctaaagtgaagtcctttgaacaggcctcgactagcaacgggtgcgtgccgatcacgaaattcgtgactgtaaccaacgaacctgtgactcaatacgtgacagtaacacccaatactactacacaatacgtaacggtgacgggtgcacctagtgtaactaccacatcccccggtaacgtgcagtggtataataccacatccattacgaacagcacgagttggtga

SEQ ID NO: 5383 - DNA, 2523 bp, Artificial Sequence
  Optimized genes for Saccharomyces cerevisiae
atggctgaaaaagaagaggccatatttcggtcagcggagatggccttggttcaattctacatcccgcaggaaattagtcgtgattccgcgtataccctcggtcagcttggtttggtgcaatttcgcgacctcaattcgaaggtacgagccttccagcggacgttcgtgaacgaaatacgacgtctagataatgtagagcgccagtaccgctacttttattctcttttgaagaaacacgacatcaaactatatgagggtgataccgataaataccttgacggatcgggggagttatacgtgcctccttctggtagcgtgattgacgactacgtacgtaatgctagctatttagaagagcggctcatccagatggaggacgcgaccgatcaaatagaagttcagaaaaacgacctcgaacagtatagatttattctacaaagtggagacgaattttttttgaaaggtgataataccgattccacatcctatatggatgaggatatgattgacgccaacggggaaaatatcgctgcagcgataggggcttccgtcaattatgtcacgggtgttatagctcgcgataaagtggctacgttagaacagatactatggcgcgtgctcaggggcaatctatttttcaagacagtcgagattgaacagccagtctacgatgttaaaacccgggagtataagcacaaaaatgctttcattgtattcagtcatggggatttgatcatcaagcggattagaaagattgccgagtcattggatgctaacttatatgacgtagactcaagcaacgaaggcagaagccagcaattggcaaaagtcaacaaaaaccttagtgacttgtatacagtcctgaagacgaccagcacaacattagagtctgaactttacgcgatagctaaagaattagactcctggttccaggatgtgactcgcgagaaagcgattttcgagatcttaaataaaagcaattatgatacgaataggaagatccttatcgctgaggggtggattcctcgtgacgaactcgcaacactgcaggcaagactgggggagatgatagccagactaggcattgacgttcctagcataattcaagtgttagatacgaatcatactccgccgacgttccaccgcacgaataagttcacagccggcttccaaagtatatgtgattgctatggtatagcgcagtacagggaaatcaatgccggtcttccaaccatagtaacatttccttttatgtttgctattatgttcggggatatgggacacggtttcctaatgactctggctgcgctgagtctggtcctcaacgagaagaaaataaacaaaatgaaacgcggtgagatcttcgatatggcgtttacaggacgatacataatcttgttgatgggcgtcttttcgatgtatacaggttttctgtataatgatattttctcaaagaccatgactattttcaaaagtggctggaagtggcctgaccattggaagaaaggggagtcaattaccgctacctccgtcgggacatatccaattggcttagattgggcatggcacggcacggaaaatgcattactcttcagcaacagttacaagatgaagttatctatactaatgggctttatccatatgacatatagttattttttttcgcttgccaatcatctgtatttcaattcaatgatcgatatcatagggaacttcattccgggattattgttcatgcaaggtatatttggttacctgtcggtttgtattgtttacaagtgggcggtagattgggtcaaagatggcaaacctgccccgggtctgctaaatatgcttataaacatgttccttagcccggggactatcgacgacgagttgtacccacaccaggccaaggtgcaagtattcctcctgctcatggctctagtgtgcataccatggttattattagtcaagcccctgcattttaaattcacgcacaaaaaaaagagccatgagcccctgccttcgactgaagccgacgcttcttctgaggacctggaggctcagcaacttatatcagccatggacgccgacgacgccgaggaagaggaggttggcagcggctcccacggagaagacttcggagatattatgattcatcaggtgatccataccattgaattctgtctcaattgtgtttcgcacactgcgtcctacctacgtttatgggctctgtcattggctcatgcgcagctgtcgtcggtcttatggactatgacgattcaaattgcattcgggtttagaggtttcgtcggcgtcttcatgactgttgctttatttgcaatgtggttcgcattgacgtgcgcagtgctagttctaatggaaggaaccagcgcaatgctccacagcttacgacttcactgggtcgaatctatgtctaaattctttgtgggagaagggcttccctacgagccctttgcgtttgagtataaggatatggaggtcgcggtcgcttcagcttcatcttcggctagttcctaa

SEQ ID NO: 5384 - DNA, 420 bp, Artificial Sequence
  Optimized genes for Saccharomyces cerevisiae
atgtggaaagcagtgatgaacgcatggaatggtacagaatcgcagtccaagaatgtgagtaacatacagagttatagtttcgaagacatgaagcgaattgtcgggaaacatgatccaaatgtagtactggtagatgtgcgtgaaccctctgaatactccattgtgcatattcctgctagcattaacgtcccctaccgttcgcacccggacgctttcgcactggacccgttagaattcgagaaacagatcggtataccgaaacccgatagtgccaaggagttgatcttttactgtgcaagtggaaaaaggggtggagaggctcagaaggtggcctcgtctcatggctatagtaacacgagtctctacccagggagcatgaacgattgggtgtcacatggcggagacaagcttgacttatag

SEQ ID NO: 5385 - DNA, 318 bp, Artificial Sequence
  Optimized genes for Saccharomyces cerevisiae
atgctcatgcccaaagaggatcggaataagattcatcagtatttgttccaggaaggcgttgtcgttgcaaaaaaggattttaaccaagccaagcatgaagaaatcgacacgaaaaacctgtatgttattaaggcacttcagtctctaacaagcaaaggttacgttaagacccaattctcctggcagtactactattatacactaaccgaggagggcgttgaatatctacgagaatacttgaacttgccagagcacatagtacccggcacatacattcaggaacgtaaccccactcaacgacctcagagacggtattag

SEQ ID NO: 5386 - DNA, 1236 bp, Artificial Sequence
  Optimized genes for Saccharomyces cerevisiae
atgagctcggcggcgacaaaagccaccttctgtattcagaatggcccgtcgttcgaaggaatttcttttggtgccaataagtccgtagctggtgaaactgtatttacaacgtcgctcgtgggttatcccgaatccatgaccgatccttcttacagaggtcaaatcttagtctttacccagcctttgatcggaaactatggcgtaccttcaggggaagctcgggacgaatataacttactcaaatattttgaatccccgcatatacatgttgtcggcatcgttgtcgcggaatatgcttatcagtactcccactggactgcggtggaatcccttgcacaatggtgccagagagagggtgtcgcagctattacaggtgtagacaccagggagctcgttcaatacctacgggaacaagggtcatcgctagggaggataacgcttgcggatcatgatccagttccgtatgttaatcccatgaagacgaacctggtggctcaggtgacaacgaaaaagccctttcatgtgtccgccctgccaggcaaagctaaggccaatgtcgccttgatagattgcggtgtgaaggagaacattatacgttgcctagtcaagcgcggggcaaacgtcactgtctttccttacgattatcgcatacaagatgtggcatcagagttcgatggcatctttttgtctaacggcccggggaaccccgaattatgtcaggcaactatttcaaacgttagggaactgcttaataatcccgtctacgactgcatacccatatttggcatttgtcttggacatcaactgttagctctagctagcggagccagcacgcataagctcaaatatggtaaccgagcgcacaacattcccgcaatggacctcacgactgggcaatgccacatcacttcacagaaccacggctatgccgtcgacccagaaaccttaccgaaagaccaatggaagccgtattttgttaatctcaacgacaagagcaacgagggcatgatacacctacagcggccgattttctcgacccagttccacccggaggccaagggtggcccgttggataccgcaattctttttgataaattctttgataatatagaaaagtatcaactgcaaagccaagcaaagtcgtccattagtctcaaggttacatactctaccgacaaaagcagactgcaatctatcaacgtaacgaagcttgcgaaagagcgcgtgctgttctga

SEQ ID NO: 5387 - DNA, 702 bp, Artificial Sequence
  Optimized genes for Saccharomyces cerevisiae
atgtcctcagctattactgctttgaccccgaaccaggtcaatgatgaactaaataagatgcaagcctttatcaggaaagaggcagaggagaaggctaaggagatacaacttaaagcggatcaggagtatgagattgaaaaaactaatatagtacgtaacgagacaaataatatcgacggtaatttcaagtctaaactgaagaaagcgatgttatctcagcaaataaccaagagcacgatagctaataaaatgcggctaaaagtcctttctgcaagagaacaatcgcttgacggcattttcgaagaaacaaaagagaaactgagcgggatagcaaacaatcgtgatgaatataagccaatactccagagcttgattgtggaagcacttcttaaattactcgaaccaaaagcaattgtaaaggctttagaacgggatgttgaccttatcgagtctatgaaggacgacattatgcgtgaatacggagagaaagcccagagagccccgctcgaagagattgtaataagtaacgactacctcaataaggacctagtgtcaggtggtgtagttgttagcaacgcatctgacaaaatcgagattaacaacactcttgaggaacggttaaaattgcttagcgaagaggcgttacccgctatcaggttagagttatacggtccgtccaagactcgtaagttctttgactaa

SEQ ID NO: 5388 - DNA, 432 bp, Artificial Sequence
  Optimized genes for Saccharomyces cerevisiae
atgtcagatgtagaggaagtagtggaggtgcaggaagagaccgtagttgagcaaacggctgaggttaccatcgaagacgctttaaaagttgtactgcgtacggctctagttcacgatggactcgcccgggggctgcgcgaaagcactaaagctctcactcgaggggaggctttgctagtagtactcgtttcgtcagtaacagaggccaatatcataaaattagtagagggattggccaacgaccctgagaataaagtaccgttgatcaaagttgccgacgcaaagcagttaggtgaatgggcaggtctcggaaagattgaccgtgaggggaacgctcgcaaagtagttggggcaagcgttgtcgtcgttaaaaactggggggctgagactgatgaactgtcgatgatcatggagcacttcagtcaacagtaa

SEQ ID NO: 5389 - DNA, 1365 bp, Artificial Sequence
  Optimized genes for Saccharomyces cerevisiae
atgtcggaacccgaatttcaacaagcctatgaagaagtagtgtcgagtcttgaggattccactctatttgagcagcatccggagtacagaaaggtactacctatagtttctgtccccgagcgaatcatacaattccgcgtaacctgggagaacgataaaggcgaacaggaagtagcacaaggctatagagttcagtataatagcgctaaggggccctataaaggagggcttcggtttcacccttcagtaaatctgtccatcctcaaattcttgggctttgagcagatctttaaaaattctctgacaggcctagatatgggcggaggaaagggtgggttgtgtgtcgacttaaagggaagaagcaacaatgaaatccggcggatttgctacgcgtttatgcgggaattaagtcggcacataggacaagacacagacgttcctgctggggacattggagtaggggggcgtgagattgggtacttatttggcgcgtatagatcctacaagaattcctgggaaggggtcttgactggaaagggattaaactggggagggagtcttatccgtccggaggctacgggttatggtctggtctactatacgcaggcaatgattgactacgcaaccaacggtaaagagtctttcgaaggtaagagagtgacgattagtggatcgggaaacgtcgctcagtacgcagctctcaaggtaatcgagctcgggggaacggtcgtcagcctttcggactctaagggttgcattatatcagagaccgggatcacatcagaacaagtcgcagatatctcgtccgcaaaagttaactttaagagtctcgaacaaatcgttaacgaatattctaccttctcagagaacaaggtacaatatatagccggtgcacgtccctggactcacgtgcagaaagtcgacattgcactcccttgtgcgacccaaaatgaagtttcaggagaggaagcaaaggctttggttgcacaaggggtgaaattcattgccgagggctcaaatatgggaagcacccctgaagccattgcggtgtttgagaccgcgcgcagcactgcaacagggccttcagaggcagtatggtatgggccgccaaaagctgctaacctcggaggggtagcggttagcggcttggaaatggcccagaatagtcagaggattacttggacatcggaacgtgttgaccaagaacttaaacgaatcatgatcaactgttttaacgaatgtatcgactatgctaaaaaatatacaaaagatggtaaggtattaccaagcctcgtgaagggtgcaaacatcgcttctttcataaaagtgtctgacgctatgttcgaccaaggagatgtattctag

SEQ ID NO: 5390 - DNA, 1197 bp, Artificial Sequence
  Optimized genes for Saccharomyces cerevisiae
atgtctcagaatgtgtacattgtcagcacggcgcgaacgcctatcgggtcattccaaggctcactgagcagtaaaacagccgtagaactaggcgcagtcgcactcaagggcgcgctagccaaggtcccagagctcgatgcctcgaaagattttgacgagataatctttgggaatgtgctcagcgcaaacctcggtcaagcgccagcgcgccaggtagcactggcagctggcctatctaatcatatagttgctagcactgtgaataaagtctgcgcgtcggccatgaaagctattatcctgggggctcaatcaattaagtgcggcaatgccgatgtagtagtagctgggggctgtgaatccatgacaaacgcgccctactacatgcctgcggctagggcgggggcaaaattcggtcaaacggtgctggtagatggggtcgaacgcgatggactcaacgatgcctatgatggactagctatgggagtgcatgccgaaaaatgtgcccgagattgggatataacacgtgagcagcaagacaacttcgccatcgaatcttatcagaagagccagaaatcacaaaaggagggtaaattcgataatgagatagttcctgtcacaataaaaggtttccgcgggaagccggacacccaagtgacaaaggatgaggagccagcgagattgcatgttgaaaagctacgtagcgcacgcaccgtttttcaaaaagagaatgggaccgtcacagcggcaaatgcatcaccgatcaatgacggagcggcggccgtcatactggtcagcgaaaaggtccttaaagagaaaaaccttaagcctctagctataattaaggggtggggagaggcagctcaccaaccggcggatttcacgtgggctccgtccctggcggtacctaaggcactaaagcatgccggcattgaagatataaactctgtggattacttcgagtttaatgaggccttcagtgtcgttggtctagttaacaccaagatattaaaattggatccctccaaggtaaacgtctacggaggagccgtcgccttgggccatcccctggggtgttctggagcccgggtagttgtcacgctcctttctatcctgcagcaggaggggggcaaaataggagttgctgcaatctgtaacgggggcggaggagcgagttcgattgtgatagaaaaaatctag

SEQ ID NO: 5391 - DNA, 474 bp, Artificial Sequence
  Optimized genes for Saccharomyces cerevisiae
atgcctatcgaccaagagaaactggcaaagttacagaagctttctgcgaacaacaaggttggtgggactcgccgtaagttgaacaagaaagcggggtcgagtgcaggggccaataaggatgatacaaaacttcaaagccagctagctaagcttcatgctgtcaccatcgataatgtggccgaggctaactttttcaaggatgacggcaaggtaatgcattttaacaaggttggcgttcaggttgctgctcagcataacacgtccgtattttacggccttcctcaggagaagaatttgcaggacttgtttccaggcattatctcccagttaggtccggaagccattcaagcgttatcccaacttgccgcgcagatggagaagcatgaagccaaagctccagccgacgcagagaagaaggacgaggcaatccctgaactagtcgaaggccagacatttgatgctgatgtagaatag

SEQ ID NO: 5392 - DNA, 483 bp, Artificial Sequence
  Optimized genes for Saccharomyces cerevisiae
atgggaaaatctcacggttataggtcacgtacgagatacatgttccagagggatttccgtaagcacggtgcggtgcatatgagcacatacctgaaaatttacaaagtcggggatattgttgatataaaagcaaacggctcgatacagaaggggatgccccataagttctaccaaggtaagacgggagtcgtctacaatgttactaaaagttccgttggtgtaatcattaacaaaatggtaggaaaccgttacctggaaaagcggctcaacctccgagtggagcacataaaacatagcaaatgccgtcaagagttcttggaaagggtgaaggctaatgccgccaaacgcgctgaagcgaaggctcaaggagttgcagttcaattgaaaagacaaccggctcaacctcgcgaaagtcgtatagttagcacagagggcaatgtaccacagaccttagccccagtgccgtacgagacctttatttag

SEQ ID NO: 5393 - DNA, 711 bp, Artificial Sequence
  Optimized genes for Saccharomyces cerevisiae
atgaagctaaatattagttatccagtcaacggaagtcagaaaacattcgagatagatgacgagcacagaattcgagtcttctttgataaacgcatcggtcaggaggttgacggggaagcagtgggtgacgagtttaaaggttatgtattcaaaatatcgggagggaacgacaagcaaggtttcccaatgaagcaaggggttcttcttcctacgcgcatcaaattactattaacgaagaatgtgagttgctaccgtccaaggagggatggggaaaggaagcgcaagtcagttcgaggggcgattgtcggacctgatctggcggttttggcattagtcattgtaaagaaaggcgaacaggaattagaaggtttgaccgacaccacggtaccgaagcgtctcggtcccaaacgcgctaataacattaggaaattttttgggctcagcaaggaggacgatgttcgtgactttgtaatcagacgggaagtgacgaaaggagagaaaacgtacacaaaggcgcccaaaatccagaggctcgtcacaccgcagcgcctacaacgaaagcgccaccaacgtgcgttaaaggtcaggaacgcacaagcgcagcgggaagctgccgctgaatatgcacaactattagccaagcgtctaagcgaaagaaaagctgagaaagccgagattagaaaacgacgcgcgagttcattgaaagcctaa

SEQ ID NO: 5394 - DNA, 894 bp, Artificial Sequence
  Optimized genes for Saccharomyces cerevisiae
atggcattccaaaaggatgctaaaagctccgcctattcatcgcgttttcagactccattccggcgccggcgagaagggaagacggactactaccaacgaaaacgactagtgacgcagcacaaggcgaaatacaataccccaaaatatcgtctcgtcgtcagatttacaaacaaagacattatttgtcagataattagtagcacaattaccggagatgtagttttagcagcagcatatagtcacgagctgccacggtatggtataactcatggactgaccaattgggctgcagcatatgcaacgggtctcttgatcgctaggcggactctgcagaagctaggcttggatgagacgtataagggcgtggaggaggtagagggggagtacgagctgacggaagcggtagaggacgggccacggccatttaaggttttcctcgatattgggttacaacggaccaccacaggtgcaagagtctttggcgccctgaagggcgcttctgatggggggttatatgtcccacattcggaaaacaggttcccaggatgggattttgagactgaggaaatagacccagaattactgcgtagctacatatttggggggcatgtaagtcagtacatggaggaattagccgacgacgatgaagagcgcttctccgagttgtttaagggttatttagcagatgacattgatgccgacagcttagaagatatctacacatctgctcacgaggccatacgagcggatccagctttcaagccaaccgaaaagaaatttacgaaggaacaatatgccgcggagtcaaaaaaataccggcagacgaagctttcaaaggaggagcgagctgcgcgcgtcgctgcaaagattgctgcactggccggccagcagtag

SEQ ID NO: 5395 - DNA, 324 bp, Artificial Sequence
  Optimized genes for Saccharomyces cerevisiae
atggccgagtcccatcggttgtatgttaaaggaaagcatttgtcctatcaacggtcgaaacgagttaataacccaaacgtttcactaataaagatcgagggcgttgcgaccccacaggatgcccagttctacctaggcaaacgtatcgcttatgtatatcgagcctctaaagaggttcgagggtctaaaatacgtgttatgtggggaaaggtcacgcgaacacatggaaatagtggcgtcgtaagggccacgtttcggaacaatcttcccgccaaaacgttcggtgcatcggtgcgaattttcctataccccagcaacatttaa

SEQ ID NO: 5396 - DNA, 1218 bp, Artificial Sequence
  Optimized genes for Saccharomyces cerevisiae
atgtttagtctcaaggcactgctcccattagcgctacttctcgtcagtgcaaaccaggttgcggccaaggtccacaaagcgaaaatctacaagcacgagttatcggacgagatgaaggaagttacgttcgaacagcatcttgcccacttaggccaaaaatacttaacgcaattcgagaaagcaaaccctgaggtagtgttcagtagagaacatccgttctttactgaaggtggccatgacgtccccctcacgaactacttgaatgctcaatactacactgatatcacgctcggtacaccgccacaaaatttcaaagtaattttggacactgggtcgtcgaacctgtgggtcccatcaaacgaatgtggtagccttgcctgttttttacacagcaaatatgatcacgaggcgtcttcgtcgtataaggctaacgggaccgaatttgcaatccaatacggcaccggttcactcgagggttacatttcgcaggacacactctccatcggggatttaacgatacctaaacaggacttcgcagaagcaacgagcgaaccgggccttacgtttgctttcggtaagttcgatgggatactcggacttggttatgacacgatctcggtcgataaggtggtgcccccattttacaatgctatccagcaggatttgctcgatgaaaaaagatttgcattctatctaggagatacatcaaaggacacagagaatggcggggaggccacattcggcgggatcgatgaatctaagtttaagggcgacataacctggctccctgtgcgaaggaaggcttattgggaagtgaaatttgagggaataggacttggtgacgaatatgctgaactagaatctcacggcgcagccatcgacacgggaacgtctttgataaccctcccttccggccttgctgaaatgataaatgcagaaattggtgcaaaaaagggttggacggggcagtatactctcgattgcaacacacgggacaacttacccgaccttatctttaatttcaatgggtacaacttcacaataggaccctatgattacaccctggaggtatccgggtcctgcatttcggcaataacaccgatggacttccccgagccagttggccccttggcaatagtcggtgacgcttttctacggaagtactactcgatttatgatttgggcaataatgcagtaggattggccaaagctatttag

SEQ ID NO: 5397 - DNA, 654 bp, Artificial Sequence
  Optimized genes for Saccharomyces cerevisiae
atgagcaaaattacatccagccaagtgcgtgagcatgtgaaggaattactgaaatattccaacgaaacaaaaaaacgcaattttctcgaaacagtagaacttcaagtaggcctgaagaactacgacccgcagcgtgataagagatttagtggatccctcaagttaccgaattgtcctaggcctaacatgtctatctgtatctttggggatgcattcgatgtcgatcgggcaaaatcatgtggtgtcgatgcaatgtccgtcgatgacctaaaaaaactgaataaaaacaagaagttgataaagaaactcagtaagaaatacaacgcatttatagcttccgaggtgctcataaaacaagtcccccggttattgggtcctcaactctcgaaggcagggaaatttcctacaccggtttcccataacgacgatctttacggcaaagtaaccgatgtccggtcaactattaagtttcagttaaagaaagtgttgtgtttagctgttgcggtcgggaacgtggagatggaggaagacgtgctggtaaatcagattttgatgtccgtgaatttcttcgtatcactcctgaaaaaaaactggcagaatgtgggatctttagtagtaaagtcttcaatgggaccggcgttcagactgtactaa

SEQ ID NO: 5398 - DNA, 1113 bp, Artificial Sequence
  Optimized genes for Saccharomyces cerevisiae
atggctgaagcatcgatcgagaagacccaaattttacaaaaatatcttgagttggaccaacggggtcgtatcatcgctgagtacgtatggatagatggtacggggaacctgcgatcgaagggacgcaccttaaagaaacgcatcacgtccatcgaccagctaccagaatggaatttcgatggttcgagtacgaatcaagcgccaggccacgattccgacatctacctcaaaccggtcgcctattacccagatccattccgacgcggagacaacatagtggtactggccgcttgctacaataatgacgggactccaaataagtttaaccaccgccatgaagccgctaagctattcgcggcgcacaaagatgaggagatctggtttggattagaacaggaatacaccctctttgatatgtacgatgacgtatatgggtggcctaaaggaggttaccctgccccacaagggccatattactgcggagtcggagcaggtaaagtctatgcacgggacatgatcgaggcacactaccgtgcttgcttatatgcaggtctggagatatcaggaataaatgcggaagttatgccttcacaatgggaattccaggttggaccctgcacggggatcgatatgggtgatcagttgtggatggcaagatactttctgcatcgggtggcagaggagtttggcatcaaaatttctttccaccctaaacccctaaaaggggactggaacggtgcaggctgccataccaacgtctcaacgaaagaaatgcgccaaccgggtgggatgaaatatatcgaacaggcaattgagaaattgtccaaacgacacgctgaacatattaaattatacggatctgacaacgacatgcgccttacgggcaggcacgagactgcgtcgatgaccgctttttcatccggcgtcgcgaatcgcggatcttcaatacgcatcccccggagtgtcgcgaaggagggctatggatatttcgaagataggcgaccggcttcgaacattgacccttacttagttactggtatcatgtgtgaaacggtatgtggtgccatagataacgctgatatgacaaaagagtttgagcgtgagtccagttaa

SEQ ID NO: 5399 - DNA, 279 bp, Artificial Sequence
  Optimized genes for Saccharomyces cerevisiae
atggccaaacggacaaagaaagtaggaataaccggcaaatacggagttcgctacggctcgagtctcaggcgacaggtaaagaagctagaaattcaacaacatgcacggtatgattgttctttctgcggaaagaaaaccgtgaagcggggagcggcgggcatctggacgtgctcctgctgcaaaaagacagtagcaggaggtgcatatacagtctccacggccgcagcggcgacggtgaggagcacaatacggcgtctaagagaaatggttgaagcctag

SEQ ID NO: 5400 - DNA, 1377 bp, Artificial Sequence
  Optimized genes for Saccharomyces cerevisiae
atgggtaaggaaaagagtcatataaatgtcgtagtgattgggcatgttgatagcggtaagtcgacgacgactgggcatctaatctacaagtgtggaggtatagacaaacgtacaatcgaaaaatttgaaaaagaggcagcagagctcggaaaagggtcctttaaatatgcgtgggtcttagataagttgaaagccgagagagaacgcgggataactatagacatcgctctctggaaattcgaaaccccaaagtatcaagtaaccgtgattgatgcccccggtcatcgtgattttataaagaatatgatcactggtacaagtcaggcggactgtgcgatattgatcattgcagggggcgtgggtgagttcgaggcaggaatcagtaaagatggtcaaacaagagagcatgcgttactagcgtttacactaggcgtacgccaactaattgtagcggttaacaagatggacagcgtaaagtgggatgaaagcagatttcaagaaattgttaaagagacttctaatttcataaaaaaagttgggtataatcctaaaacggtaccattcgttcccatctctgggtggaacggcgacaatatgattgaggcgaccacgaacgcgccttggtacaaaggttgggagaaggagacaaaggcgggagtcgtcaaaggaaaaacactcctagaagcgatcgacgccatagagcaaccatcgcgccccactgacaagccgctgcgtttgccattacaagacgtatataaaattggcgggattggaacggtcccagtgggaagggtcgagacaggagttattaagccggggatggtagtaacattcgcaccggcaggggtcaccacagaggtaaaaagcgtagagatgcatcatgaacaattggagcagggggtccctggcgacaacgtcggtttcaatgtcaaaaacgtatcggtgaaggaaattcgtcgtgggaacgtgtgcggagatgccaagaacgatccacccaaaggatgtgcgtcttttaatgccacagtgatcgtgttaaatcacccgggccaaatttcggctggatattcgcccgttttggattgccatacggctcacatcgcctgtcggttcgacgagctgcttgagaagaatgatcgtcgatctggtaaaaaactagaagaccaccctaagtttctaaagtcaggagacgctgcgttagtgaaattcgtcccgtctaagccaatgtgtgttgaggcattttccgagtatccccctttaggccgcttcgcggtccgagacatgcgccagacagtagccgtgggagtaatcaaatcggtagacaaaaccgaaaaggcagcaaaggttacaaaagcggctcaaaaagcagctaaaaaataa

SEQ ID NO: 5401 - DNA, 525 bp, Artificial Sequence
  Optimized genes for Saccharomyces cerevisiae
atgagtgcaaaagcccaaaaccccatgagggatcttaaaatcgaaaaactcgttttaaatatctctgtcggagaaagtggcgaccgactcacacgagccagcaaagttctggaacaactaagtggacagacgcccgtacagtctaaagcacgatatacagtcaggacatttggcatccgacgaaacgaaaagatcgccgttcacgttactgtccgaggtcccaaggcggaagaaatcttagaacgtgggttaaaagttaaagaatatcagctacgcgatcgtaatttttcagccaccgggaactttggtttcggaatagacgagcacatcgacctgggtattaagtatgacccatcgatcgggatctttggaatggacttttatgtcgttatgaaccgccctggagctagggtaactcgccgcaaacgctgtaagggtactgtaggcaactcccacaagaccacaaaggaagacactgtgtcttggtttaaacagaagtatgacgcggacgtgctggacaaatag

SEQ ID NO: 5402 - DNA, 864 bp, Artificial Sequence
  Optimized genes for Saccharomyces cerevisiae
atgcaggcgatagctgactccttttcggtgcccaaccggctggtaaaggaactccagtatgacaacgaacagaatctagagtcggatttcgtaacaggagctagtcaattccaaaggcttgctccgtccttaacggttccgcctatagcatcaccacagcagttcctacgcgcacacacggacgatagtagaaacccagactgcaagattaaaattgctcatggcaccacgacccttgcctttaggttccaaggaggcatcatagtcgcggtggactctagggcaaccgctggcaattgggtcgcttcgcaaactgttaaaaaagtcattgagataaatcctttccttttgggcacgatggccgggggtgcggcggattgccaattctgggagacttggctaggttcgcaatgcaggctacacgagctaagagaaaaggaaaggatctcggtagcggctgcatcgaaaatcttgagtaacctagtttatcaatataagggagccggcctgagcatgggcacaatgatctgcgggtatacgcgcaaagagggtccgacaatttactatgttgactcggatggaacgaggttgaagggggacatattttgtgtgggatccggacaaacgttcgcgtatggagttctagattccaattataaatgggacttatctgtggaagacgcattgtacttggggaaacgaagtatcctggccgctgcccacagagacgcctatagtggtggctcagtaaacttgtatcacgtaaccgaggacggatggatttaccacggtaaccatgacgttggggagctcttctggaaggtcaaagaggaagaggggagttttaacaatgtcattggctaa

SEQ ID NO: 5403 - DNA, 438 bp, Artificial Sequence
  Optimized genes for Saccharomyces cerevisiae
atgggcaaggggaaaccacgggggctaaacagtgctcgtaagttacgagtgcaccgccgtaataaccgatgggcggaaaataattataagaaacgcttattgggaacggcttttaagtcgagtccattcgggggttcaagccacgcgaagggaatagtactcgagaagttaggcatagagagtaagcagcctaattccgcaatccgaaagtgcgtgagagtccagctaattaagaacggtaagaaagttaccgccttcgttccaaacgatggatgcttgaactttgtagatgaaaacgatgaagtgttactagcaggctttgggagaaaaggtaaagcaaaaggggatatacctggggtaagattcaaagtggtaaaagtgtcgggggtgtccctcttggcactatggaaagaaaagaaagagaaaccgagatcctga

SEQ ID NO: 5404 - DNA, 522 bp, Artificial Sequence
  Optimized genes for Saccharomyces cerevisiae
atgttggcccttgcggacaacatactcaggattattaatttcttatttctagtaatttcaattgggcttatatctagtcttttaaatacccagcaccgccattcctctcgggtcaattattgtatgtttgcttgcgcctatggtattttcacagactcattgtacggagtatttgcgaacttcatagaaccgctagcctggccgctcgtacttttcacgctcgacttcctcaattttgtttttacgtttaccgccgggacggtgttggccgtgggaattagggcacattcatgtaataactcctcttatgtggattcaaacaaaatcacgcagggaagtggcactcgctgcagacaagctcaggccgcggtggcattcctgtacttttcctgtgcgatctttttggcaaagacactaatgtctgtttttaatatgatttcgaatggggcatttggatcggggtcgttttcgaagagaagaaggaccggccaggtaggggttccgaccataagtcaggtatag

SEQ ID NO: 5405 - DNA, 630 bp, Artificial Sequence
  Optimized genes for Saccharomyces cerevisiae
atgtcccagcaggtgggcaattctatacggcgaaagcttgtcatagttggagatggtgcttgtggcaaaacttgcctcctgatcgtattctcaaaaggtcagtttccggaagtctatgtaccgaccgtgttcgagaattatgtcgcggatgttgaggtggacgggcggcgtgttgaattagccctttgggacacggctgggcaggaggactacgatagactaaggcctctctcatacccggactccaacgttgtgcttatatgtttttctattgatcttccggacagcctcgaaaacgtgcaggaaaagtggatcgcggaggtcttgcatttttgtcaaggggttccaataattctcgtgggatgcaaagtcgacctcagaaatgatccacagactatagaacagctgaggcaggagggccaacagccggtgaccagccaggaaggccaatcagtagccgaccagatcggcgctacagggtattatgagtgcagtgctaagacgggttacggagttcgagaagtgttcgaagccgcaaccagggcatccctcatggggaaatctaagaccaatggcaaagctaagaaaaacacaacagagaaaaaaaagaagaaatgcgtgcttctgtaa

SEQ ID NO: 5406 - DNA, 3099 bp, Artificial Sequence
  Optimized genes for Saccharomyces cerevisiae
atggccgacaccccctcagttgcggtccaggcaccgccagggtacggcaagacggagttgtttcacttgccattgatcgcgctcgcaagtaagggcgacgttaagtacgtctccttcctttttgttccgtatacagtgcttctagctaattgtatgattcggcttgggcggtgtggatgcctaaacgtcgcgcccgtccggaatttcatagaggaaggctgtgacggcgtcaccgatttgtacgtgggtatatacgacgacttggcgagcaccaacttcaccgatcgtatagcagcgtgggaaaacatagttgagtgcacttttcgaacaaacaatgtcaaattaggatatcttattgttgacgaattccataactttgagaccgaagtttaccgtcagtcacaattcggtggtattactaacctggatttcgatgcctttgaaaaggcaatttttctatcgggcactgcgccggaggcggtagcagacgccgccctgcaacgtatcggcttaacgggtctggcgaagaaaagtatggatataaacgaactgaagagaagcgaggatttgtcacgcggactaagttcttaccctactaggatgtttaatctgatcaaagaaaaaagtgaagtaccactcgggcacgtgcacaaaatttggaagaaggtggagtcccaaccagaggaagctttgaaattattattggccttattcgagatagaacctgagagtaaagctattgtagtggcatccaccacaaacgaggttgaagaactcgcatgtagttggcgcaagtatttccgggtcgtgtggattcacggcaaacttggagcggcggagaaggtaagtcgcacgaaagaattcgttacggatggaagcatgcgtgtacttataggaacgaaattagtgaccgagggtattgatatcaaacagcttatgatggtgattatgctggataacaggttgaacatcatagagctcatccaaggggtaggtcgtcttcgtgatggcggtttgtgctatctcctatcgcgaaagaactcctgggctgccaggaataggaaaggtgaactaccgccaatcaaggaaggatgtataactgaacaggtccgagagttttatggtctcgagagcaagaaaggtaaaaaaggacaacacgtgggttgctgcggatctcggacggatctatcagcggacacggtcgaactgatcgaacgtatggaccgactggccgagaaacaggccacagcatccatgtccattgtcgcacttccttcaagcttccaagagtctaattcgtcagatcgctgtagaaaatattgcagtagtgacgaagattcaaacacatgcatccacggttcggccaacgccagcaccaatgcaacgaccaattcaagtacgaatgcgactacgaccgcttccacgaatgttcgcacctctgctaccactacagcatccatcaatgtaaggacgtcagcgacaactaccgagtctaccaatagttcaacgaatgctactacaacggcaagcacaaatgtaagaacaagcgccacaactactgcttctattaacgtgcgtacaagtgctacgacaacggaaagcacgaactccaatacaagtgccactacaactgaaagcacagacagcaatacaagcgctactacaaccgagtctacaaatagtagcacaaatgctacgacgactgcttcaataaacgtacgcacatcggccaccacaacagagtctacaaactcaaatacaaatgcgactacaacggagagtaccaacagttctactaatgctaccacgacggaaggaacaaactcaaatacctcggcaacaaccactgccagcaccaatagcagcacaaatgcaacaaccacagagtccacaaacgcttcagcaaaggaggacgcaaacaaggatggaaatgcagaggataataggttccatcccgttacagacatcaacaaggaatcgtataaaaggaaaggatcacagatggttctgctagaacgtaagaaactcaaggcacagtttcctaatacgtcagaaaacatgaacgtactgcagtttctaggtttccgcagtgatgaaataaagcatctcttcttatatgggattgacgtgtatttttgccctgagggagtattcacgcagtacggtctttgtaagggctgtcagaagatgtttgagttgtgtgtttgctgggctggtcaaaaggtgtcatatcgcaggatggcatgggaagcactagcagtggaacggatgctcagaaacgacgaagagtataaggaatatttagaggatatcgagccgtaccatggggaccctgtggggtacttaaaatacttcagtgtaaaacgcggtgagatatactcgcagatacagagaaattatgcctggtatctcgccataactcgcagaagagagaccataagtgtgttggacagtacacggggcaaacaaggtagtcaagtattccgtatgtcaggtcgtcaaattaaagaattgtactacaaggtctggtccaacctacgcgagagtaaaacggaggtacttcagtactttctgaactgggacgagaaaaaatgcagggaagaatgggaggccaaggacgacacggtgttcgttgaagccctagaaaaagttggagtgtttcaacggctgagaagtatgactagcgctggattacaaggcccgcaatacgtcaaactacaatttagtcgtcaccatagacagctacgatcacgttacgaacttagcctaggcatgcatttgcgggatcaactagctttgggcgtcaccccatcgaaagtccctcactggaccgcgttcctctcaatgctaatcggattattttgtaacaagacctttcggcaaaagctagagtatttactcgaacagatttccgaagtttggctccttccccattggttggatctcgctaacgtggaagtattagccgccgataatactcgggtccccttgtacatgctaatggtggcagtgcacaaggagctggatagtgatgacgttccagacggaagatttgacatattgctgtgcagagatagcagccgggaagtaggagaatga

SEQ ID NO: 5407 - DNA, 501 bp, Unknown
  Interferon gamma
atgaaatatacaagttatatcttggcttttcagctctgcatcgttttgggttctcttggctgttactgccaggacccatatgtaaaagaagcagaaaaccttaagaaatattttaatgcaggtcattcagatgtagcggataatggaactcttttcttaggcattttgaagaattggaaagaggagagtgacagaaaaataatgcagagccaaattgtctccttttacttcaaactttttaaaaactttaaagatgaccagagcatccaaaagagtgtggagaccatcaaggaagacatgaatgtcaagtttttcaatagcaacaaaaagaaacgagatgacttcgaaaagctgactaattattcggtaactgacttgaatgtccaacgcaaagcaatacatgaactcatccaagtgatggctgaactgtcgccagcagctaaaacagggaagcgaaaaaggagtcagatgctgtttcgaggtcgaagagcatcccagtaa

SEQ ID NO: 5408 - DNA, 501 bp, Artificial Sequence
  Optimized genes for Chinese hamster ovary (CHO) cells
atgaagtacaccagctacatcctggccttccagctgtgcatcgtgctgggttctcttggctgctactgccaggacccctatgtgaaagaagctgagaacctgaagaaatacttcaatgctggccacagtgatgtggctgacaatggcaccctcttcctgggcatcctcaagaactggaaggaggagagtgacagaaagatcatgcagtcccagattgtgagcttctactttaagctgttcaaaaacttcaaggatgaccagagcatccagaagtctgtggagaccatcaaggaagacatgaacgtgaagttcttcaacagcaacaagaagaagagagatgattttgagaagctcaccaactacagcgtgacagacctgaatgtgcagaggaaggccatccatgagctgattcaggtgatggctgaactgtctcctgctgccaagactggcaagaggaaaagatctcagatgctgtttagaggaagaagagccagccagtga

SEQ ID NO: 5409 - DNA, 501 bp, Artificial Sequence
  Optimized genes for Chinese hamster ovary (CHO) cells
atgaagtacaccagctacatcctggccttccagctgtgcatcgtgctggggagcctgggctgctactgccaggacccctatgtgaaagaggcagagaacctgaagaagtatttcaatgccggccacagtgatgtggctgacaatggcaccctcttcctgggcatcctcaagaactggaaggaggagagtgacagaaagatcatgcagagtcagattgtgtccttctacttcaagctgtttaaaaacttcaaagatgaccagagcattcagaagtctgtggagaccatcaaggaagacatgaacgtgaagttcttcaacagcaacaagaaaaagagagatgattttgagaagctcaccaactacagcgtgacagacctgaatgtgcagaggaaggccatccatgagctcatccaggtgatggctgagctgagccctgctgccaagacaggcaagaggaaaaggagccagatgctgttccggggcaggagggcctcccagtga

SEQ ID NO: 5410 - DNA, 501 bp, Artificial Sequence
  Optimized genes for Chinese hamster ovary (CHO) cells
atgaagtacaccagctacatcctggccttccagctgtgcatcgtgctggggagcctgggctgctactgccaggacccctatgtgaaagaagcagagaacctgaagaagtatttcaatgctggccacagtgatgtggctgacaatggcaccctcttcctgggcatcctcaagaactggaaggaggagagtgacaggaagatcatgcagagccagattgtgtccttctacttcaagctgtttaaaaacttcaaagatgaccagtccatccagaagtctgtggagaccatcaaggaagacatgaacgtgaagttcttcaacagcaacaagaaaaagagggatgattttgagaagctcaccaactacagtgtgacagacctgaatgtgcagaggaaagccatccatgagctcattcaggtgatggctgagctgagccctgctgccaagacaggcaagagaaaaagatctcagatgctgttcagaggaagaagagcctcccagtga

SEQ ID NO: 5411 - DNA, 501 bp, Artificial Sequence
  Optimized genes for Chinese hamster ovary (CHO) cells
atgaagtatacttcctacatcttggcgttccagctgtgcattgtgctggggagccttggctgttactgtcaggatccctacgtaaaggaggctgaaaatctgaaaaagtattttaacgctggtcattctgacgtcgccgataatggaaccttattcttgggaatccttaaaaattggaaggaggaaagtgacagaaagattatgcagtcccagatcgtttccttttattttaagctgttcaagaacttcaaagacgatcaaagtatccagaaatcggtcgagaccattaaagaggacatgaatgttaaattctttaacagcaacaagaagaagcgtgatgattttgaaaagctcactaattacagcgtgacagacctcaacgtgcaacgaaaagccatacacgagctgattcaagtgatggcagaactgtctccagctgccaagacaggtaagaggaaaaggtctcagatgctattcagaggccgccgggcatcacagtga

SEQ ID NO: 5412 - DNA, 501 bp, Artificial Sequence
  Optimized genes for Chinese hamster ovary (CHO) cells
atgaagtatacctcgtacatccttgccttccagctgtgcattgtactgggaagcttgggctgttattgccaggatccctacgtgaaagaagccgagaacctgaaaaagtattttaacgccggacattccgatgtggcggacaacgggacactcttcttaggtatattgaaaaattggaaggaggagtctgaccgcaaaatcatgcagagtcaaatcgtgagcttctacttcaagctgttcaagaactttaaagacgaccagagcatccagaagtctgtcgagaccattaaagaagacatgaatgtgaaattttttaattccaacaagaagaagagagatgacttcgagaagctcaccaactactcagtgactgatctcaatgtccagcgaaaggctatccacgaactgattcaggttatggcagaactttcacctgctgcaaaaacagggaagcggaagaggtcccaaatgctgttcaggggcagacgtgccagtcaatga

SEQ ID NO: 5413 - DNA, 501 bp, Artificial Sequence
  Optimized genes for Chinese hamster ovary (CHO) cells
atgaagtatactagctatatcctcgccttccagctatgtattgttcttggcagtctggggtgctactgtcaggacccatatgtcaaggaggctgaaaacctgaagaagtactttaacgcaggtcattccgatgtagccgacaacggcaccctgttcctcgggatccttaaaaattggaaggaagaatccgaccggaagataatgcaaagtcaaatagtgagcttctactttaaattgttcaaaaatttcaaagatgatcagtcgattcagaaaagcgtggagacaattaaggaggacatgaatgtgaaattttttaattcaaacaagaaaaagagggacgattttgagaagctcacaaactactctgtcactgatctgaatgttcagagaaaagccatccacgagttgatccaagtgatggcagaattatcccctgctgctaagaccggaaagcgtaaaaggtctcagatgctgttccgcggaagacgagcgtcacagtga

SEQ ID NO: 5414 - DNA, 501 bp, Artificial Sequence
  Optimized genes for Chinese hamster ovary (CHO) cells
atgaagtatacttcctacatcttggccttccagctgtgcattgtgctggggagccttggctgttactgtcaggatccctacgtaaaggaggctgaaaatctgaaaaagtattttaacgctggtcattctgacgtcgccgataatggaaccttattcttgggaatccttaaaaattggaaggaggaaagtgacagaaagattatgcagtcccagatcgtttccttttattttaagctgttcaagaacttcaaagacgatcaaagtatccagaaatcggtcgagaccattaaagaggacatgaatgttaaattctttaacagcaacaagaagaagcgtgatgattttgaaaagctcactaattacagcgtgacagacctcaacgtgcaacgaaaagccatacacgagctgattcaagtgatggcagaactgtctccagctgccaagacaggtaagaggaaaaggtctcagatgctattcagaggccgccgggcatcacagtga

SEQ ID NO: 5415 - DNA, 501 bp, Artificial Sequence
  Optimized genes for Chinese hamster ovary (CHO) cells
atgaagtatacttcctacatcttggcgttccagctgtgcattgtgctggggagccttggctgttactgtcaggatccctacgtaaaggaggctgaaaatctgaaaaagtattttaacgctggtcattctgacgtcgccgataatggaaccttattcttgggaatccttaaaaattggaaggaggaaagtgacagaaagattatgcagtcccagatcgtttccttttattttaagctgttcaagaacttcaaagacgatcagagtatccagaaatcggtcgagaccattaaagaggacatgaatgttaaattctttaacagcaacaagaagaagcgtgatgattttgaaaagctcactaattacagcgtgacagacctcaacgtgcaacgaaaagccatacacgagctgattcaagtgatggcagaactgtctccagctgccaagacaggtaagaggaaaaggtctcagatgctattcagaggccgccgggcatcacagtga

SEQ ID NO: 5416 - DNA, 501 bp, Artificial Sequence
  Optimized genes for Chinese hamster ovary (CHO) cells
atgaagtatacttcctacatcttggcgttccagctgtgcattgtgctggggagccttggctgttactgtcaggatccctacgtaaaggaggctgaaaatctgaaaaagtattttaacgctggtcattctgacgtcgccgataatggaaccttattcttgggaatccttaaaaattggaaggaggaaagtgacagaaagattatgcagtcccagatcgtttccttttattttaagctgttcaagaacttcaaagacgatcaaagtatccagaaatcggtcgagaccattaaagaggacatgaatgttaaattctttaacagcaacaagaagaagcgtgatgattttgaaaagctcactaattacagcgtgacagacctcaacgtgcaacgaaaagccatacacgagctgattcaagtgatggcagaactgtctccagctgccaagacaggtaagaggaaaaggtctcagatgctgttcagaggccgccgggcatcacagtga

SEQ ID NO: 5417 - DNA, 501 bp, Artificial Sequence
  Optimized genes for Chinese hamster ovary (CHO) cells
atgaagtatacttcctacatcttggccttccagctgtgcattgtgctggggagccttggctgttactgtcaggatccctacgtaaaggaggctgaaaatctgaaaaagtattttaacgctggtcattctgacgtcgccgataatggaaccttattcttgggaatccttaaaaattggaaggaggaaagtgacagaaagattatgcagtcccagatcgtttccttttattttaagctgttcaagaacttcaaagacgatcagagtatccagaaatcggtcgagaccattaaagaggacatgaatgttaaattctttaacagcaacaagaagaagcgtgatgattttgaaaagctcactaattacagcgtgacagacctcaacgtgcaacgaaaagccatacacgagctgattcaagtgatggcagaactgtctccagctgccaagacaggtaagaggaaaaggtctcagatgctgttcagaggccgccgggcatcacagtga
